(19) United States
(12) Patent Application Publication
(10) Pub. No.: US 2005/0246784 A1
(43) Pub. Date: Nov. 3, 2005

(54) Method for identifying herbicidally active substances

(76) Inventors: Gunnar Plesch, Potsdam (DE); Astrid Blau, Stahnsdorf (DE); Klaus Daschner, Berlin (DE); Mathieu Klein, Berlin (DE)

Correspondence Address: NOVAK DRUCE DELUCA & QUIGG, LLP, 1300 EYE STREET NW, SUITE 400 EAST, WASHINGTON, DC, 20005, US

(21) Appl. No.: 10/467,962

(22) PCT Filed: Feb. 13, 2002
(86) PCT No.: PCT/EP02/01466

§ 371 Date: Aug. 14, 2003

(30) Foreign Application Priority Data
Feb. 16, 2001 (DE) 101078439
Mar. 23, 2001 (DE) 101255373

(51) Int. Cl. A01H 1/00; C12Q 1/68; A01N 25/00; C12N 15/82; C12N 5/04

(52) U.S. Cl. 800/278; 435/6; 435/419; 435/456; 504/116.1

(57) ABSTRACT

The present invention describes genes and methods for the isolation of genes which encode gene products which, if not present, lead to a greatly delayed growth and/or complete standstill of growth of Arabidopsis thaliana at the seedling level. The invention describes the use of these genes and gene products encoded by them for the discovery of novel herbicides. In addition, the present invention describes the use of the genes and gene products identified herein for the generation of plants which are resistant to herbicides. The present invention also relates to a method for identifying herbicidally active substances, to substances identified by this method and to their use as herbicides. The invention furthermore relates to nucleic acid constructs, vectors, organisms comprising the nucleic acid constructs and/or vectors, specifically transgenic plants comprising the nucleic acid constructs and/or vectors. Moreover, the invention relates to a method for identifying antagonists and to their use, antibodies and antisense RNA molecules and compositions comprising a herbicidal substance isolated by the methods according to the invention. Furthermore, the invention realtes to compositions comprising the antibody, the antisense nucleic acid and/or the antagonist.

[0001] Modern agriculture without the use of herbicides is inconceivable. The value of the herbicides used worldwide is currently estimated at approx. 30 billion DM. Even though a large number of highly effective and ecologically acceptable herbicides are currently available, the need for novel herbicides results firstly from the fact that weeds keep developing a resistance to currently employed herbicides, which means that some of these can no longer be employed, and secondly from the fact that some of the herbicides are ecologically disadvantageous. Herbicides will currently in many cases still be employed as mixtures which comprise several active ingredient components, which is of little benefit environmentally and which makes particularly high demands on the formulation.

[0002] Novel herbicides should be distinguished by as broad as possible a range of action, by ecological and toxicological acceptability and by low application rates.

[0003] The procedure so far for identifying and developing novel herbicides was characterized by applying potential active ingredients directly to suitable test plants. The disadvantage of this procedure is that relatively large amounts of substance are necessary to carry out the tests. This is rarely the case in the age of combinatorial chemistry, where a very large variety of substances can be prepared, albeit in small amounts. This is therefore an important limitation in development of novel herbicides. Also, the direct application to the plants to be tested means that even the first screening step makes extremely high demands on the substance, since not only the inhibition or other modulation of the activity of a cellular target (as a rule a protein or enzyme) is required, but the substance must initially reach this target in the first place, which means that even this first step makes demands on the test substance with regard to the uptake by the plant; permeability through the various cell walls and membranes, persistence for achieving the desired effect, and, finally, inhibition/modification of the activity of the desired target enzyme.

[0004] In view of these demands, it is therefore not surprising that, on the one hand, the identification of novel active ingredients causes increasingly high costs and, on the other hand, the number of active ingredients which are discovered decreases all the time.

[0005] It is an object of the present invention to provide targets for identifying novel herbicides and to provide novel herbicides and their use. We have found that this object is achieved by a method of identifying herbicidally active substances which comprises
[0006] a) the expression or the activity of the gene product of a nucleic acid or of a gene encompassing:
   [0007] aa) nucleic acid sequence with the sequence shown in SEQ ID NO: 1, SEQ ID NO: 3, SEQ ID NO: 5, SEQ ID NO: 7, SEQ ID NO: 9, SEQ ID NO: 11, SEQ ID NO: 13, SEQ ID NO: 15, SEQ ID NO: 17, SEQ ID NO: 26, SEQ ID NO: 28, SEQ ID NO: 30, SEQ ID NO: 32, SEQ ID NO: 34, SEQ ID NO: 36, SEQ ID NO: 38, SEQ ID NO: 40, SEQ ID NO: 44, SEQ ID NO: 46, SEQ ID NO: 48, SEQ ID NO: 50, SEQ ID NO: 52, SEQ ID NO: 54, SEQ ID NO: 56, SEQ ID NO: 58, SEQ ID NO: 60, SEQ ID NO: 62, SEQ ID NO: 64, SEQ ID NO: 66, SEQ ID NO: 68, SEQ ID NO: 70, SEQ ID NO: 72, SEQ ID NO: 74, SEQ ID NO: 76, SEQ ID NO: 78, SEQ ID NO: 80, SEQ ID NO: 82, SEQ ID NO: 84, SEQ ID NO: 86, SEQ ID NO: 88, SEQ ID NO: 90, SEQ ID NO: 92, SEQ ID NO: 94, SEQ ID NO: 96, SEQ ID NO: 98, SEQ ID NO: 100, SEQ ID NO: 102, SEQ ID NO: 106 or SEQ ID NO: 108 or
   [0008] bb) nucleic acid sequence which, owing to the degeneracy of the genetic code, can be derived by back translation from the amino acid sequences shown in SEQ ID NO: 2, SEQ ID NO: 4, SEQ ID NO: 6, SEQ ID NO: 8, SEQ ID NO: 10, SEQ ID NO: 12, SEQ ID NO: 14, SEQ ID NO: 16, SEQ ID NO: 18, SEQ ID NO: 27, SEQ ID NO: 29, SEQ ID NO: 31, SEQ ID NO: 33, SEQ ID NO: 35, SEQ ID NO: 37, SEQ ID NO: 39, SEQ ID NO: 41, SEQ ID NO: 45, SEQ ID NO: 47, SEQ ID NO: 49, SEQ ID NO: 51, SEQ ID NO: 53, SEQ ID NO: 55, SEQ ID NO: 57, SEQ ID NO: 59, SEQ ID NO: 61, SEQ ID NO: 63, SEQ ID NO: 65, SEQ ID NO: 67, SEQ ID NO: 69, SEQ ID NO: 71, SEQ ID NO: 73, SEQ ID NO: 75, SEQ ID NO: 77, SEQ ID NO: 79, SEQ ID NO: 81, SEQ ID NO: 83, SEQ ID NO: 85, SEQ ID NO: 87, SEQ ID NO: 89, SEQ ID NO: 91, SEQ ID NO: 93, SEQ ID NO: 95, SEQ ID NO: 97, SEQ ID NO: 99, SEQ ID NO: 101, SEQ ID NO: 103, SEQ ID NO: 105, SEQ ID NO: 107 or SEQ ID NO: 109;
   [0009] cc) nucleic acid sequence which is a derivative or a fragment of the nucleic acid sequences shown in SEQ ID NO: 1, SEQ ID NO: 3, SEQ ID NO: 5, SEQ ID NO: 7 SEQ ID NO: 9, SEQ ID NO: 11, SEQ ID NO: 13, SEQ ID NO: 15, SEQ ID NO: 17, SEQ ID NO: 26, SEQ ID NO: 28, SEQ ID NO: 30, SEQ ID NO: 32, SEQ ID NO: 34, SEQ ID NO: 36, SEQ ID NO: 38, SEQ ID NO: 40, SEQ ID NO: 44, SEQ ID NO: 46, SEQ ID NO: 48, SEQ ID NO: 50, SEQ ID NO: 52, SEQ ID NO: 54, SEQ ID NO: 56, SEQ ID NO: 58, SEQ ID NO: 60, SEQ ID NO: 62, SEQ ID NO: 64, SEQ ID NO: 66, SEQ ID NO: 68, SEQ ID NO: 70, SEQ ID NO: 72, SEQ ID NO: 74, SEQ ID NO: 76, SEQ ID NO: 78, SEQ ID NO: 80, SEQ ID NO: 82, SEQ ID NO: 84, SEQ ID NO: 86, SEQ ID NO: 88, SEQ ID NO: 90, SEQ ID NO: 92, SEQ ID NO: 94, SEQ ID NO: 96, SEQ ID NO: 98, SEQ ID NO: 100, SEQ ID NO: 102, SEQ ID NO: 106 or SEQ ID NO: 108 and which has at least 60% homology at the nucleic acid level;
   [0010] dd) nucleic acid sequence which encodes derivatives or fragments of the polypeptides with the amino acid sequences shown in SEQ ID NO: 2, SEQ ID NO: 4, SEQ ID NO: 6, SEQ ID NO: 8, SEQ ID NO: 10, SEQ ID NO: 12, SEQ ID NO: 14, SEQ ID NO: 16, SEQ ID NO: 18, SEQ ID NO: 27, SEQ ID NO: 29, SEQ ID NO: 31, SEQ ID NO: 33, SEQ ID NO: 35, SEQ ID NO: 37, SEQ ID NO: 39, SEQ ID NO: 41, SEQ ID NO: 45, SEQ ID NO: 47, SEQ ID NO: 49, SEQ ID NO: 51, SEQ ID NO: 53, SEQ ID NO: 55, SEQ ID NO: 57, SEQ ID NO: 59, SEQ ID NO: 61, SEQ ID NO: 63, SEQ ID NO: 65, SEQ ID NO: 67, SEQ ID NO: 69, SEQ ID NO: 71, SEQ ID NO: 73, SEQ ID NO: 75, SEQ ID NO: 77, SEQ ID NO: 79, SEQ ID NO: 81, SEQ ID NO: 83, SEQ ID NO: 85, SEQ ID NO: 87, SEQ ID NO: 89, SEQ ID NO: 91, SEQ ID NO: 93, SEQ ID NO: 95, SEQ ID NO: 97, SEQ ID NO: 99, SEQ ID NO: 101, SEQ ID NO: 103, SEQ ID NO: 105, SEQ ID NO: 107 or SEQ ID NO: 109 which have at least 50% homology at the amino acid level;
   [0011] ee) nucleic acid sequence which encodes a fragment or an epitope of a polypeptide which specifically binds to an antibody, the antibody binding specifically to a polypeptide encoded by the sequence shown in SEQ ID NO: 1, SEQ ID NO: 3, SEQ ID NO: 5, SEQ ID NO: 7, SEQ ID NO: 9, SEQ ID NO: 11, SEQ ID NO: 13, SEQ ID NO: 15, SEQ ID NO: 17, SEQ ID NO: 26, SEQ ID NO: 28, SEQ ID NO: 30, SEQ ID NO: 32, SEQ ID NO: 34, SEQ ID NO: 36, SEQ ID NO: 38, SEQ ID NO: 40, SEQ ID NO: 44, SEQ ID NO: 46, SEQ ID NO: 48, SEQ ID NO: 50, SEQ ID NO: 52, SEQ ID NO: 54, SEQ ID NO: 56, SEQ ID NO: 58, SEQ ID NO: 60, SEQ ID NO: 62, SEQ ID NO: 64, SEQ ID NO: 66, SEQ ID NO: 68, SEQ ID NO: 70, SEQ ID NO: 72, SEQ ID NO: 74, SEQ ID NO: 76, SEQ ID NO: 78, SEQ ID NO: 80, SEQ ID NO: 82, SEQ ID NO: 84, SEQ ID NO: 86, SEQ ID NO: 88, SEQ ID NO: 90, SEQ ID NO: 92, SEQ ID NO: 94, SEQ ID NO: 96, SEQ ID NO: 98, SEQ ID NO: 100, SEQ ID NO: 102, SEQ ID NO: 106 or SEQ ID NO: 108;
   [0012] ff) nucleic acid sequence which encodes a fragment of a nucleic acid shown in aa) and which has m6A-methyltransferase activity, DNA-binding activity or DNA repair activity, for example as in the case of RAD 54, thioredoxin activity, VAV2 activity, fructokinase activity, zinc finger protein activity, LYTB activity, crepopin activity, leucine protein activity, DNAJ activity, CRS1 activity, alanyl-tRNA-synthetase activity, OEP86 activity, FMRF-amide-propeptide isolog activity, 26S proteosome subunit S5B activity, geranylgeranyl-pyrophosphate synthase activity, cecropin family signature, ftsH chloroplast protease activity, AIM1 activity, UDP-glucuronyl transferase activity, FPF1 activity, SHI-like zinc finger protein activity, Crp1 activity, CRS1 activity, translation releasing factor RF-1 activity, farnesyl transferase subunit A activity, ATP-dependent copper transporter RAN1 activity; and/or
   [0013] gg) nucleic acid sequence which encodes derivatives of the polypeptides with the amino acid sequences shown in SEQ ID NO: 2, SEQ ID NO: 4, SEQ ID NO: 6, SEQ ID NO: 8, SEQ ID NO: 10, SEQ ID NO: 12, SEQ ID NO: 14, SEQ ID NO: 16, SEQ ID NO: 18, SEQ ID NO: 27, SEQ ID NO: 29, SEQ ID NO: 31, SEQ ID NO: 33, SEQ ID NO: 35, SEQ ID NO: 37, SEQ ID NO: 39, SEQ ID NO: 41, SEQ ID NO: 45, SEQ ID NO: 47, SEQ ID NO: 49, SEQ ID NO: 51, SEQ ID NO: 53, SEQ ID NO: 55, SEQ ID NO: 57, SEQ ID NO: 59, SEQ ID NO: 61, SEQ ID NO: 63, SEQ ID NO: 65, SEQ ID NO: 67, SEQ ID NO: 69, SEQ ID NO: 71, SEQ ID NO: 73, SEQ ID NO: 75, SEQ ID NO: 77, SEQ ID NO: 79, SEQ ID NO: 81, SEQ ID NO: 83, SEQ ID NO: 85, SEQ ID NO: 87, SEQ ID NO: 89, SEQ ID NO: 91, SEQ ID NO: 93, SEQ ID NO: 95, SEQ ID NO: 97, SEQ ID NO: 99, SEQ ID NO: 101, SEQ ID NO: 103, SEQ ID NO: 105, SEQ ID NO: 107 or SEQ ID NO: 109 which has at least 20% homology at the amino acid level and an equivalent biological activity; or
[0014] b) the expression or activity of an amino acid sequence which is encoded by a nucleic acid sequence of aa) to gg),
   [0015] and selecting the substances which reduce or block the expression or the activity.

[0016] Expression is understood as meaning the de-novo synthesis in vitro and in vivo of nucleic acids and of proteins encoded by nucleic acids, in particular that of the abovementioned nucleic acid and amino acid sequences. The term “expression” encompasses all of the biosynthetic steps which lead to the mature protein or to its degradation, for example transcription, translation, modification or processing of nucleic acids and proteins, for example pre- or post-transcriptional processing steps or post-translational modifications, for example splicing, editing, polyadenylation, capping, modifications of amino acids, for example glycosylation, methylation, acetylation, binding of coenzymes, phosphorylation, ubiquitation, binding of fatty acids, processing of signal peptides and the like.

[0017] For the purposes of the invention, transcription is to be understood as meaning RNA synthesis with the aid of an RNA polymerase in 5′→3′-direction using a DNA template. Translation is to be understood as meaning in-vitro and in-vivo protein biosynthesis. The term gene product is understood as meaning any molecule and any substance which originates owing to the expression, for example the transcription or translation, of a nucleic acid, for example of a DNA or RNA, for example of a gene, and the processing products which follow, such as, for example, the products obtained after splicing or modification. Thus, the term gene product is understood as meaning, for example, a processed RNA, for example a catalytic RNA, a functional RNA, such as tRNAs or rRNAs, or a coding RNA, such as mRNA. A protein, which is likewise understood as being a “gene product”, is synthesized as the consequence of an mRNA being translated. Proteins can be subjected to various processing steps as enumerated above by way of example during and after translation. Activity of the gene product is understood as meaning the biological activity or function of an RNA or of a protein, such as, for example, the enzymatic activity, the receptor binding property, the ability of binding certain proteins, nucleic acids or metabolites, for example in protein complexes, that is to say for example the regulatory property or the transporter function of the protein or of the RNA, as it occurs naturally in the organism. A reduced activity of the gene product is to be understood as meaning a reduction in the biological activity compared with the natural activity of the gene product by at least 10%, advantageously at least 20%, preferably at least 30%, especially preferably by at least 50% and very especially preferably by at least 70%. A blockage of the activity of the gene product means the complete, that is to say 100%, blockage of the activity or a part-blockage of the activity, preferably an at least 80%, especially preferably at least 90%, very especially preferably at least 95% blockage of the biological activity.

[0018] The activity of the gene product can also be reduced indirectly, for example by inhibiting the formation or activity of interaction partners, for example by influencing the metabolic cascade which the gene product is part of. For example, not only the enzyme in question, but also another enzyme or protein in the same metabolic cascade may be inhibited, and this leads to blocking of the subsequent, previous or any other enzyme involved and thus of the gene product described herein, for example by substrate or product inhibition. Such reductions by indirectly influencing the activity of an enzyme have been described in detail for example for the interaction of the glycolysis proteins and glycolysis metabolites and can be applied readily to other metabolic pathways in which the gene products described herein play a role. Likewise, the activity of a gene product used according to the invention can be reduced or inhibited by reducing or inhibiting the activity of interaction partners, for example other proteins in a a protein complex, using the gene product described herein. The result may be that all of the complex is no longer activated or formed in parts only, if at all, or is no longer subject to regulation. Examples of such ways of influencing the activity are described for example for spliceosomes, polymerases, ribosomes and the like.

[0019] A fragment is understood as meaning a part-sequence of a sequence described herein which encompasses fewer nucleotides or amino acids than the sequences described herein. For example, a fragment can encompass 1%, 5%, 10%, 30%, 50%, 70% or 90% of the original sequence. Preferably, a fragment encompasses 100, more preferably 50, even more preferably less than 20, amino acids of the nucleic acids in question.

[0020] The importance of the individual biosynthesis steps is known to the skilled worker and can be found for example in “Molecular Biology of the cell”, Alberts, New York, 1998, “Biochemie” Stryer, 1988, New York, “Biochemieatlas”, Michal, Heidelberg, 1999 or in “Dictionary of Biotechnology”, Coombs, 1992.

[0021] Thus, an embodiment relates to a method according to the invention wherein the expression or the activity of the abovementioned nucleic acids or amino acids is reduced or blocked by reducing or blocking the transcription, translation, processing and/or modification of at least one nucleic acid sequence or amino acid sequence according to the invention. The activity of one, two, three or more sequences can be reduced or blocked in accordance with the invention.

[0022] The method according to the invention can be carried out in individual separate approaches or, advantageously, in a high-throughput screening (HTS) and can be used for identifying herbicidally active substances or antagonists. Substances which interact with the abovementioned nucleic acids or their gene products can also be identified advantageously in the abovementioned method; these substances are potential herbicides whose action can be improved further by a traditional chemical synthesis.

[0023] Substances identified, or selected, by the method can be applied advantageously to a plant to test the herbicidal activity of the substances. Those substances which show a herbicidal activity are selected. In a further advantageous embodiment of the method, the substances can also be identified in an in-vitro test, in addition to the abovementioned in-vivo test method. Such an in-vitro test with the nucleic acids according to the invention or their gene products has the advantage that the substances can be screened rapidly and in a simple fashion for their biological action. Such tests are also advantageously suitable for what is known as HTS.

[0024] The method can be carried out with free nucleic acids such as DNA or RNA, free gene products or, advantageously, in an organism, the organism used being bacteria, yeasts, fungi or, advantageously, plants. The organisms used are, advantageously, the conditional or natural mutants of the sequences SEQ ID NO: 1, SEQ ID NO: 3, SEQ ID NO: 5, SEQ ID NO: 7, SEQ ID NO: 9, SEQ ID NO: 11, SEQ ID NO: 13, SEQ ID NO: 15 or SEQ ID NO: 17 SEQ ID NO: 26, SEQ ID NO: 28, SEQ ID NO: 30, SEQ ID NO: 32, SEQ ID NO: 34, SEQ ID NO: 36, SEQ ID NO: 38, SEQ ID NO: 40, SEQ ID NO: 44, SEQ ID NO: 46, SEQ ID NO: 48, SEQ ID NO: 50, SEQ ID NO: 52, SEQ ID NO: 54, SEQ ID NO: 56, SEQ ID NO: 58, SEQ ID NO: 60, SEQ ID NO: 62, SEQ ID NO: 64, SEQ ID NO: 66, SEQ ID NO: 68, SEQ ID NO: 70, SEQ ID NO: 72, SEQ ID NO: 74, SEQ ID NO: 76, SEQ ID NO: 78, SEQ ID NO: 80, SEQ ID NO: 82, SEQ ID NO: 84, SEQ ID NO: 86, SEQ ID NO: 88, SEQ ID NO: 90, SEQ ID NO: 92, SEQ ID NO: 94, SEQ ID NO: 96, SEQ ID NO: 9 8, SEQ ID NO: 100, SEQ ID NO: 102, SEQ ID NO: 106 or SEQ ID NO: 108. Conditional mutants are to be understood as being mutants which have to be induced first in order to show reduced expression, e.g. transcription or translation, of the abovementioned nucleic acids or the gene products encoded by them. An example of such conditional mutants are mutants in which the nucleic acids are located after a temperature-sensitive promoter which is nonfunctional at higher temperatures, that is to say which prevents transcription at higher temperatures, for example above 37° C. It is likewise possible to regulate the expression by means of an effector molecule, for example when the expression is controlled by means of a promoter capable of being regulated, such as the Tet systems.

[0025] A further embodiment according to the invention is a method of identifying an antagonist of proteins which are encoded by a nucleic acid sequence as is employed in the method according to the invention, in particular selected from the group consisting of:
[0026] a) a nucleic acid sequence with the sequence shown in SEQ ID NO: 1, SEQ ID NO: 3, SEQ ID NO: 5, SEQ ID NO: 7, SEQ ID NO: 9, SEQ ID NO: 11, SEQ ID NO: 13, SEQ ID NO: 15, SEQ ID NO: 17, SEQ ID NO: 26, SEQ ID NO: 28, SEQ ID NO: 30, SEQ ID NO: 32, SEQ ID NO: 34, SEQ ID NO: 36, SEQ ID NO: 38, SEQ ID NO: 40, SEQ ID NO: 44, SEQ ID NO: 46, SEQ ID NO: 48, SEQ ID NO: 50, SEQ ID NO: 52, SEQ ID NO: 54, SEQ ID NO: 56, SEQ ID NO: 58, SEQ ID NO: 60, SEQ ID NO: 62, SEQ ID NO: 64, SEQ ID NO: 66, SEQ ID NO: 68, SEQ ID NO: 70, SEQ ID NO: 72, SEQ ID NO: 74, SEQ ID NO: 76, SEQ ID NO: 78, SEQ ID NO: 80, SEQ ID NO: 82, SEQ ID NO: 84, SEQ ID NO: 86, SEQ ID NO: 88, SEQ ID NO: 90, SEQ ID NO: 92, SEQ ID NO: 94, SEQ ID NO: 96, SEQ ID NO: 98, SEQ ID NO: 100, SEQ ID NO: 102, SEQ ID NO: 106 or SEQ ID NO: 108 or
[0027] b) a nucleic acid which, owing to the degeneracy of the genetic code, can be derived by back translation from the amino acid sequences shown in SEQ ID NO: 2, SEQ ID NO: 4, SEQ ID NO: 6, SEQ ID NO: 8, SEQ ID NO: 10, SEQ ID NO: 12, SEQ ID NO: 14, SEQ ID NO: 16, SEQ ID NO: 18, SEQ ID NO: 27, SEQ ID NO: 29, SEQ ID NO: 31, SEQ ID NO: 33, SEQ ID NO: 35, SEQ ID NO: 37, SEQ ID NO: 39, SEQ ID NO: 41, SEQ ID NO: 45, SEQ ID NO: 47, SEQ ID NO: 49, SEQ ID NO: 51, SEQ ID NO: 53, SEQ ID NO: 55, SEQ ID NO: 57, SEQ ID NO: 59, SEQ ID NO: 61, SEQ ID NO: 63, SEQ ID NO: 65, SEQ ID NO: 67, SEQ ID NO: 69, SEQ ID NO: 71, SEQ ID NO: 73, SEQ ID NO: 75, SEQ ID NO: 77, SEQ ID NO: 79, SEQ ID NO: 81, SEQ ID NO: 83, SEQ ID NO: 85, SEQ ID NO: 87, SEQ ID NO: 89, SEQ ID NO: 91, SEQ ID NO: 93, SEQ ID NO: 95, SEQ ID NO: 97, SEQ ID NO: 99, SEQ ID NO: 101, SEQ ID NO: 103, SEQ ID NO: 105, SEQ ID NO: 107 or SEQ ID NO: 109;
[0028] c) nucleic acid sequence which is a derivative or a fragment of the nucleic acid sequences shown in SEQ ID NO: 1, SEQ ID NO: 3, SEQ ID NO: 5, SEQ ID NO: 7 SEQ ID NO: 9, SEQ ID NO: 11, SEQ ID NO: 13, SEQ ID NO: 15, SEQ ID NO: 17, SEQ ID NO: 26, SEQ ID NO: 28, SEQ ID NO: 30, SEQ ID NO: 32, SEQ ID NO: 34, SEQ ID NO: 36, SEQ ID NO: 38, SEQ ID NO: 40, SEQ ID NO: 44, SEQ ID NO: 46, SEQ ID NO: 48, SEQ ID NO: 50, SEQ ID NO: 52, SEQ ID NO: 54, SEQ ID NO: 56, SEQ ID NO: 58, SEQ ID NO: 60, SEQ ID NO: 62, SEQ ID NO: 64, SEQ ID NO: 66, SEQ ID NO: 68, SEQ ID NO: 70, SEQ ID NO: 72, SEQ ID NO: 74, SEQ ID NO: 76, SEQ ID NO: 78, SEQ ID NO: 80, SEQ ID NO: 82, SEQ ID NO: 84, SEQ ID NO: 86, SEQ ID NO: 88, SEQ ID NO: 90, SEQ ID NO: 92, SEQ ID NO: 94, SEQ ID NO: 96, SEQ ID NO: 98, SEQ ID NO: 100, SEQ ID NO: 102, SEQ ID NO: 106 or SEQ ID NO: 108 and which has at least 60% homology at the nucleic acid level;
[0029] d) nucleic acid sequence which encodes derivatives or fragments of the polypeptides with the amino acid sequences shown in SEQ ID NO: 2, SEQ ID NO: 4, SEQ ID NO: 6, SEQ ID NO: 8, SEQ ID NO: 10, SEQ ID NO: 12, SEQ ID NO: 14, SEQ ID NO: 16, SEQ ID NO: 18, SEQ ID NO: 27, SEQ ID NO: 29, SEQ ID NO: 31, SEQ ID NO: 33, SEQ ID NO: 35, SEQ ID NO: 37, SEQ ID NO: 39, SEQ ID NO: 41, SEQ ID NO: 45, SEQ ID NO: 47, SEQ ID NO: 49, SEQ ID NO: 51, SEQ ID NO: 53, SEQ ID NO: 55, SEQ ID NO: 57, SEQ ID NO: 59, SEQ ID NO: 61, SEQ ID NO: 63, SEQ ID NO: 65, SEQ ID NO: 67, SEQ ID NO: 69, SEQ ID NO: 71, SEQ ID NO: 73, SEQ ID NO: 75, SEQ ID NO: 77, SEQ ID NO: 79, SEQ ID NO: 81, SEQ ID NO: 83, SEQ ID NO: 85, SEQ ID NO: 87, SEQ ID NO: 89, SEQ ID NO: 91, SEQ ID NO: 93, SEQ ID NO: 95, SEQ ID NO: 97, SEQ ID NO: 99, SEQ ID NO: 101, SEQ ID NO: 103, SEQ ID NO: 105, SEQ ID NO: 107 or SEQ ID NO: 109 which have at least 50% homology at the amino acid level;
[0030] e) nucleic acid sequence which encodes a fragment or an epitope of a polypeptide which specifically binds to an antibody, the antibody binding specifically to a polypeptide encoded by the sequence shown in SEQ ID NO: 1, SEQ ID NO: 3, SEQ ID NO: 5, SEQ ID NO: 7, SEQ ID NO: 9, SEQ ID NO: 11, SEQ ID NO: 13, SEQ ID NO: 15, SEQ ID NO: 17, SEQ ID NO: 26, SEQ ID NO: 28, SEQ ID NO: 30, SEQ ID NO: 32, SEQ ID NO: 34, SEQ ID NO: 36, SEQ ID NO: 38, SEQ ID NO: 40, SEQ ID NO: 44, SEQ ID NO: 46, SEQ ID NO: 48, SEQ ID NO: 50, SEQ ID NO: 52, SEQ ID NO: 54, SEQ ID NO: 56, SEQ ID NO: 58, SEQ ID NO: 60, SEQ ID NO: 62, SEQ ID NO: 64, SEQ ID NO: 66, SEQ ID NO: 68, SEQ ID NO: 70, SEQ ID NO: 72, SEQ ID NO: 74, SEQ ID NO: 76, SEQ ID NO: 78, SEQ ID NO: 80, SEQ ID NO: 82, SEQ ID NO: 84, SEQ ID NO: 86, SEQ ID NO: 88, SEQ ID NO: 90, SEQ ID NO: 92, SEQ ID NO: 94, SEQ ID NO: 96, SEQ ID NO: 98, SEQ ID NO: 100, SEQ ID NO: 102, SEQ ID NO: 106 or SEQ ID NO: 108;
[0031] f) nucleic acid sequence which encodes a fragment of a nucleic acid shown in aa) and which has m6A-methyltransferase activity, DNA-binding activity or DNA repair activity, for example as in the case of RAD 54, thioredoxin activity, VAV2 activity, fructokinase activity, zinc finger protein activity, LYTB activity, crepopin activity, leucine protein activity, DNAJ activity, CRS1 activity, alanyl-tRNA-synthetase activity, OEP86 activity, FMRF-amide-propeptide isolog activity, 26S proteosome subunit S5B activity, geranylgeranyl-pyrophosphate synthase activity, cecropin family signature, ftsH chloroplast protease activity, AIM1 activity, UDP-glucuronyl transferase activity, FPF1 activity, SHI-like zinc finger protein activity, Crp1 activity, CRS1 activity, translation releasing factor RF-1 activity, farnesyl transferase subunit A activity, ATP-dependent copper transporter RAN1 activity, syntaxin or syntaxin-like-protein activity, inositol-polyphosphate-5′-phosphatase activity, UDP—N-acetylmuramoyl-alanyl-D-glutamate-2,6-diaminopimelate ligase activity (murE), β-glucosidase activity, hydroxymethylglutaryl-CoA reductase activity, GDSL-motif-lipase/hydroxylase-like-protein activity, cellulose-synthase-like-protein activity, tRNA-glutamine synthetase activity, exonuclease-like-protein activity, sec-independent translocase protein TATC activity or selenium-binding-protein-like-protein activity; and/or
[0032] g) nucleic acid sequence which encodes derivatives of the polypeptides with the amino acid sequences shown in SEQ ID NO: 2, SEQ ID NO: 4, SEQ ID NO: 6, SEQ ID NO: 8, SEQ ID NO: 10, SEQ ID NO: 12, SEQ ID NO: 14, SEQ ID NO: 16, SEQ ID NO: 18, SEQ ID NO: 27, SEQ ID NO: 29, SEQ ID NO: 31, SEQ ID NO: 33, SEQ ID NO: 35, SEQ ID NO: 37, SEQ ID NO: 39, SEQ ID NO: 41, SEQ ID NO: 44, SEQ ID NO: 46, SEQ ID NO: 48, SEQ ID NO: 50, SEQ ID NO: 52, SEQ ID NO: 54, SEQ ID NO: 56, SEQ ID NO: 58, SEQ ID NO: 60, SEQ ID NO: 62, SEQ ID NO: 64, SEQ ID NO: 66, SEQ ID NO: 68, SEQ ID NO: 70, SEQ ID NO: 72, SEQ ID NO: 74, SEQ ID NO: 76, SEQ ID NO: 78, SEQ ID NO: 80, SEQ ID NO: 82, SEQ ID NO: 84, SEQ ID NO: 86, SEQ ID NO: 88, SEQ ID NO: 90, SEQ ID NO: 92, SEQ ID NO: 94, SEQ ID NO: 96, SEQ ID NO: 98, SEQ ID NO: 100, SEQ ID NO: 102, SEQ ID NO: 106 or SEQ ID NO: 108 which has at least 20% homology at the amino acid level or an equivalent biological activity; or
[0033] by following through the following process steps:
[0034] i) contacting cells which express the protein, or the protein, with a candidate substance;
[0035] ii) assaying the biological activity of the protein;
[0036] iii) comparing the biological activity of the protein with a standard activity in the absence of the candidate substance, a reduced biological activity of the protein indicating that the candidate substance is an antagonist.

[0037] “ii)” describes the testing of one of the above-described biological activities, e.g. an enzyme activity as stated in the examples, or a binding, preferably a strong binding between protein material and candidate material.

[0038] In an advantageous embodiment of the above-described method, the antagonist(s) identified under iii) is/are applied to a plant to test its/their herbicidal activity and the antagonist(s) which show(s) a herbicidal activity is/are selected.

[0039] The method according to the invention can be carried out in individual separate approaches in-vivo or in-vitro and/or advantageously jointly or, especially advantageously, in a high-throughput screening and can be used for identifying herbicidally active substances or antagonists.

[0040] The nucleic acid sequences identified or selected in the method according to the invention are essential for the growth and the development of higher plants. Suppression of the formation of the gene products, i.e. of expression, for example by exerting a specific effect on, for example, the transcription, the translation or the processing and/or of the suppression of the function or biological activity exerted by the encoded gene products by substances, advantageously low-molecular-weight substances with a molecular weight of less than 1000 daltons, advantageously less than 900 daltons, preferably less than 800 daltons, particularly preferably less than 700 daltons, very particularly preferably less than 600 daltons, advantageously with a Ki value of less than 1 mM and fewer than three hydroxyl groups on a carbon atom-containing ring or proteinogenic substances or a sense or antisense RNA or an antibody or antibody fragment in intact plants therefore leads to advantageously massive changes regarding the growth and the development of the plants in question. The substances identified in the method according to the invention are therefore suitable as herbicides in agriculture.

[0041] The nucleic acids SEQ ID NO: 1, SEQ ID NO: 3, SEQ ID NO: 5, SEQ ID NO: 7, SEQ ID NO: 9, SEQ ID NO: 11, SEQ ID NO: 13, SEQ ID NO: 15, SEQ ID NO: 17, SEQ ID NO: 26, SEQ ID NO: 28, SEQ ID NO: 30, SEQ ID NO: 32, SEQ ID NO: 34, SEQ ID NO: 36, SEQ ID NO: 38 or SEQ ID NO: 40, SEQ ID NO: 44, SEQ ID NO: 46, SEQ ID NO: 48, SEQ ID NO: 50, SEQ ID NO: 52, SEQ ID NO: 54, SEQ ID NO: 56, SEQ ID NO: 58, SEQ ID NO: 60, SEQ ID NO: 62, SEQ ID NO: 64, SEQ ID NO: 66, SEQ ID NO: 68, SEQ ID NO: 70, SEQ ID NO: 72, SEQ ID NO: 74, SEQ ID NO: 76, SEQ ID NO: 78, SEQ ID NO: 80, SEQ ID NO: 82, SEQ ID NO: 84, SEQ ID NO: 86, SEQ ID NO: 88, SEQ ID NO: 90, SEQ ID NO: 92, SEQ ID NO: 94, SEQ ID NO: 96, SEQ ID NO: 98, SEQ ID NO: 100, SEQ ID NO: 102, SEQ ID NO: 106 or SEQ ID NO: 108 which are used in the methods according to the invention are essential for organisms, preferably for plants. Some of the gene products of the sequences stated can be seen, for example, from the polypeptides of the sequences SEQ ID NO: 2, SEQ ID NO: 4, SEQ ID NO: 6, SEQ ID NO: 8, SEQ ID NO: 10, SEQ ID NO: 12, SEQ ID NO: 14, SEQ ID NO: 16, SEQ ID NO: 18, SEQ ID NO: 27, SEQ ID NO: 29, SEQ ID NO: 31, SEQ ID NO: 33, SEQ ID NO: 35, SEQ ID NO: 37, SEQ ID NO: 39, SEQ ID NO: 41, SEQ ID NO: 45, SEQ ID NO: 47, SEQ ID NO: 49, SEQ ID NO: 51, SEQ ID NO: 53, SEQ ID NO: 55, SEQ ID NO: 57, SEQ ID NO: 59, SEQ ID NO: 61, SEQ ID NO: 63, SEQ ID NO: 65, SEQ ID NO: 67, SEQ ID NO: 69, SEQ ID NO: 71, SEQ ID NO: 73, SEQ ID NO: 75, SEQ ID NO: 77, SEQ ID NO: 79, SEQ ID NO: 81, SEQ ID NO: 83, SEQ ID NO: 85, SEQ ID NO: 87, SEQ ID NO: 89, SEQ ID NO: 91, SEQ ID NO: 93, SEQ ID NO: 95, SEQ ID NO: 97, SEQ ID NO: 99, SEQ ID NO: 101, SEQ ID NO: 103, SEQ ID NO: 105, SEQ ID NO: 107 or SEQ ID NO: 109. The genomic DNA of the sequences is represented in each case in SEQ ID NO: 19 (genomic DNA of line P95), SEQ ID NO: 20 (genomic DNA of line P9), SEQ ID NO: 21 (genomic DNA of line P38), SEQ ID NO: 22 (genomic DNA of line P44), SEQ ID NO: 23 (genomic DNA of line P77), SEQ ID NO: 24 (genomic DNA of line P102), SEQ ID NO: 43 (genomic DNA of line A 301034) and SEQ ID NO: 42 (genomic DNA of line A 300857). For lines A 300841 and A 300367, the genomic sequence is identical with SEQ ID NO: 32 and SEQ ID NO: 40, since no intron was found.

[0042] SEQ ID NO: 1 (=clone P95) encodes a protein (PID: g2460037), which has similarities with various m6A methyl transferases, among others from the mouse (NP_{—}062695) and humans (AAB71850).

[0043] SEQ ID NO: 3 (=clone P9) encodes a “DNA repair protein RAD54-like” protein homolog situated on chromosome 3 (EMBL/AP000419) of Arabidopsis. In the BLAST alignment, it has similarities with a series of DNA-binding proteins such as helicases, transactivators and the like (Emery et al., Gene 104 (1), 103-106, 1991). There exists a particularly great similarity with the Schizosaccharomyces pombe DNA repair protein RHP 54 (Muris et al., J. Cell. Sci. 109 (Pt 1), 73-81, 1996).

[0044] SEQ ID NO: 5 (=clone P38) encodes an ORF on chromosome 3 (EMBLNEW/AC023912), which encodes possibly a thioredoxin. The BLAST alignment reveals similarities with thioredoxins of various origins (Fraser et al., Nature 390 (6660), 580-586, 1997; Reith et al., Plant Mol. Biol. Rep., 13, 333-335, 1995).

[0045] Clone P44 (=SEQ ID NO: 7) encodes a protein of the TAC clone K15C23 (EMBLALERT/AB024024) without definitive homology in the BLAST search. Sequence alignments at the amino acid level show weak homologies with VAV2 proteins (small ras-like GTP-binding protein, Swissprot Q60992, Schuebel et al., Oncogene 13 (2), 363-371, 1996; Henske et al., Ann. Hum. Genet. 59 (Pt 1), 25-37, 1995).

[0046] SEQ ID NO: 9 (=clone P77) probably encodes a fructokinsase of the BAC clone F24B22 of chromosome 3 (EMBL/ATF24B22). BLAST alignments confirm this homology (swissprot P37829, Smith et al., Plant Physiol., 102 (3), 1043, 1993; Blatch et al., Gene, 95 (1), 17-23, 1990).

[0047] SEQ ID NO: 11 encodes a protein (Accession number BAB09578.1) which has weak homologies with various zinc finger proteins. It shows weak homologies with zinc finger proteins and DNA-binding proteins, such as, for example, the rat zinc finger protein 265 (Karginova, E. A., Am. J. Physiol. 273 (5 Pt 2), F731-F738 (1997)) for which a function for the regulation of transcription and/or splicing is assumed. In-vitro transcription or splicing assays have been described many times and are known to the skilled worker.

[0048] The protein encoded by SEQ ID NO: 13 (AB36712.1) has similarities with LYTB proteins, specifically with LYTB SYNY3 from Synechocystis (Q55643). The gene, or the protein encoded by the gene, is located on chromosome V (Accession number AB006706). Some ESTs (gb:Z34640, Z30476, AA605545, Z34228, H76883, Z26425) are known within the sequence of SEQ ID NO: 13.

[0049] SEQ ID NO: 15 encodes a hypothetical protein (CAB81447,1) which contains the crepropin family signature and shows weak homologies with myc-protooncogenes.

[0050] The protein encoded by SEQ ID NO: 17 (see also ESTAV528166) (AAF23295) has a certain homology with a leucine-rich human protein (Accession number P42704, Wang et al., In vitro Cell Dev. Biol. Amin. 1994, 30A(2): 111-114). It shows a substantial homology with a leucine-rich human protein (LRP130), whose function is unknown, but has weak homologies at the amino acid level with the consensus sequences of the ATP binding sites in ATP-dependent kinases and of the protein kinase C phosphorylation site of the epidermal growth factor receptor.

[0051] SEQ ID No: 26 encodes a protein which, over a region of 40 amino acids, has homologies with various DNAJ chaperone proteins (Heat Shock Protein 40), for example with DNAJ protein (Q9UXR9) from Methanosarcina thermophila (Hoffmann-Bang, Gene 238 (2), 387-395, 1999).

[0052] SEQ ID No: 28 encodes a hypothetical protein (CAC01859.1). The derived protein sequence shows marked homologies with the maize CRS1 gene product (AAG00595), which is required for splicing the group II intron of the chloroplast gene atpF.

[0053] SEQ ID No: 30 probably encodes an alanyl-tRNA syntethase (BAB10601.1).

[0054] SEQ ID No: 32 encodes a protein which has a strong homology with the chloroplast outer envelope 86 protein OEP86 from pea P. sativum, GenBank Accession Number Z31581 and has an ATP/GTP binding site motif (P-loop). ESTs (EST gb:AI998804.1, R90258, AA651438) are already known for this ORF (CAB80744.1).

[0055] SEQ ID No: 34 encodes a protein whose derived amino acid sequence (AAF25967.1) shows marked similarity with an Arabidopsis FMRF-amide propeptide isolog (gi|1871179).

[0056] SEQ ID No: 36 encodes an unknown protein (BAB02572.1) with weak homology with proteosomal protein 26S PROTEASOM SUBUNIT S5B, (Deveraux, 1995, J. Biol. Chem. 270 (40), 23726.

[0057] SEQ ID NO: 38 encodes an unknown protein.

[0058] SEQ ID NO: 40 encodes a protein with homology with a geranylgeranyl-pyrophosphate synthase (Bartley, Plant Physiol. 104, 1469-1470, 1994).

[0059] SEQ ID NO: 44 encodes a hypothetical protein of the ORF AT4g28590, which has a “cecropin” family signature (AA237-245).

[0060] SEQ ID NO: 46 encodes a putative ftsH chloroplast protease of the ORF At2g30950.

[0061] SEQ ID NO: 48 has similarity with the “AIM1” protein from Arabidopsis (CAB43915.1). Several ESTs, GB:Z31666, gb:Z33957, Z31666 have already been described for this ORF (F19B15.40). This protein is a peroxysomal tetrafunctional enzyme of the fatty acid metabolism.

[0062] SEQ ID NO: 50 encodes a UDP-glucuronyl-transferase-like protein of the ORF K21H1.19. It is highly likely that the transcription is modified or prevented, and the function of the gene thus destroyed, by the incorporation of the T-DNA into this position.

[0063] SEQ ID NO: 52 encodes a protein with unknown function of the ORF At2g15820.

[0064] SEQ ID NO: 54 encodes a protein of the ORF ATF12B17_{—}20, an FPF1-like (flowering promoting factor1) protein.

[0065] SEQ ID NO: 56 encodes a protein of the ORF ATF12B17_{—}10 with similarity with the Homo sapiens KIAA1038 protein.

[0066] SEQ ID NO: 58 encodes a protein of the ORF F24P17.10 with unknown function. The blastp alignment with standard settings reveals pronounced homologies with a nodulin/glutamate-ammonia ligase-like protein.

[0067] SEQ ID NO: 60 encodes an SHI-like zinc finger protein (short internodes) of the ORF K1L20.13.k

[0068] SEQ ID NO: 62 encodes a protein with similarity with crp1 from Zea mays, PIR:T01685 (ORF F4P12_{—}400). This ORF additionally contains the ESTs gb:AI999771.1, T45254, AA713158*.

[0069] SEQ ID NO: 64 encodes a putative protein with similarities with hypothetical proteins from Arabidopsis. The blastp analysis moreover reveals pronounced homology with CRS1 from Zea mays Accession AAG00595, which is a group II intron splicing factor (Till,B et al., RNA 7 (9), 1227-1238 (2001)) ORF (T21H19_{—}100).

[0070] SEQ ID NO: 66 encodes a protein of unknown function of the gene At5g24315.

[0071] SEQ ID NO: 68 encodes a protein ORF (T20O10_{—}10) with a high degree of similarity with translation releasing factor RF-1 from Synechocystis (PIR:S76914). The derived amino acid sequence comprises a prokaryotic type Class I peptide chain detachment factor motif, AA280-296.

[0072] SEQ ID NO: 70 encodes a protein with a high degree of similarity with an allergin (“minor allergen”) from Alternaria alternata (PIR2:S43111). The ESTS gb:R64949, AA651052 have already been found for ORF (C7A10.610).

[0073] SEQ ID NO: 72 encodes a protein with similarity with the alpha-subunit of a putative signal sequence receptor (ORF At2g1160).

[0074] SEQ ID NO: 74 encodes a protein with unknown function of the ORF AT4g01220, which contains the ESTs gb:AA597894, AA597304.

[0075] When subjected to blastp analysis with standard settings, SEQ ID NO: 76 reveals a similarity with oxidoreductases. The insertion of the T-DNA at this position interrupts the ORF F13O11.11. The cellular function of the encoded proteins is not known.

[0076] SEQ ID NO: 78 encodes the protein of the ORF F25L23_{—}240*, a farnesyl transferase subunit A.

[0077] SEQ ID NO: 80 encodes an ATP-dependent-copper-transporter-RAN1-like protein (ORF T19K24.18).

[0078] SEQ ID NO: 82 encodes the protein of the ORF F19B15.50 and has similarities with glycine-rich proteins. The ORF contains the ESTs gb:Z29181, T42831, Z34138, Z33797, Z30844.

[0079] SEQ ID NO: 84 encodes a protein with unknown function (ORF K21H1.18).

[0080] SEQ ID NO: 86 which, in the blastp alignment with standard setting reveals a high degree of homology with a variety of syntaxins and syntaxin-like proteins, including from plants. A plurality of ESTs (gb|F15498, gb|H37515, gb|T41906, gb|T22448, gb|W43356, gb|T20739) have already been identified for the ORF F3O9.4.

[0081] SEQ ID NO: 88 encodes the protein of the ORF AT2g31830, a putative inositol-polyphosphate-5′ phosphatase.

[0082] SEQ ID NO: 90 encodes the protein of the ORF F24D7.13, which encodes a putative UDP—N-acetylmuramoylalanyl-D-glutamate-2, 6-diaminopimelate ligase (murE).

[0083] SEQ ID NO: 92 encodes the protein of the ORF MRC8.5, which encodes a beta-glucosidase.

[0084] SEQ ID NO: 94 encodes the protein of the ORF F15M4.1, which encodes a hydroxymethylglutaryl-CoA reductase.

[0085] SEQ ID NO: 96 encodes the protein of the ORF MRN17.4. This ORF encodes a GDSL-motif-lipase/hydrolase-like protein.

[0086] SEQ ID NO: 98 encodes the protein of the ORF dl3705c, which encodes a cellulose-synthase-like protein.

[0087] SEQ ID NO: 100 encodes the protein of the ORF K5J14.11, which encodes a maize-crp1-protein-like protein.

[0088] SEQ ID NO: 102 encodes the protein of the ORF F4F7.26. This ORF encodes a putative t-RNA glutamine synthetase and shows homology in particular with the Lupinus luteus tRNA glutamine synthetase GI:2995454.

[0089] SEQ ID NO: 104 encodes the protein of the ORF MFB13.17, which encodes an exonuclease-like protein.

[0090] SEQ ID NO: 106 encodes the protein of the ORF At2g01110. This ORF encodes a putative “sec-independent” translocase protein TATC.

[0091] SEQ ID NO: 108 encodes the protein of the ORF F28J12.180, which encodes a putative protein. blastp analyses with standard setting reveal that the derived amino acid sequence not only has pronounced homogies with a variety of hypothetical and putative proteins, but also a high degree of similarity with the selenium-binding-protein-like proteins.

[0092] All of the abovementioned sequences were identified in Arabidopsis.

[0093] The suppression of the formation of the gene products or the suppression of the function or activity exerted by the encoded gene products in intact plants by a low-molecular-weight substance leads to reduced, preferably to suppressed growth; the development of the plant is drastically altered and suppressed.

[0094] Other clones which drastically alter the growth and the development of the plants are clones P95 and P99a, they are also advantageously suitable for identifying herbicides. The genomic region in which the insertion of the T-DNA was effected in clone P91 is located in a region for which no Open Reading Frame (=ORF) could have been predicted. In clone P91, the insertion of the T-DNA was effected in position 6632 of the P1 clone MUJ8 (AB028621) of the Arabidopsis chromosome III. The sequence can be found in AB028621. In the case of clone P99a, too, the insertion of the T-DNA (position 96710 of the BAC F10K1 [AC067971] of the Arabidopsis chromosome I) was effected at a location in the genome for which no ORF was predicted. The genomic sequence can be found in clone AC067971.

[0095] These abovementioned sequences or functional portions thereof make possible the identification of herbicides which can be used in agriculture, for example, via a method which comprises the following steps:
[0096] a) providing two lines of an organism which functionally express the gene products encoded by one of the sequences described for the method according to the invention, in particular SEQ ID NO: 1, SEQ ID NO: 3, SEQ ID NO: 5, SEQ ID NO: 7, SEQ ID NO: 9, SEQ ID NO: 11, SEQ ID NO: 13, SEQ ID NO: 15, SEQ ID NO: 17, SEQ ID NO: 26, SEQ ID NO: 28, SEQ ID NO: 30, SEQ ID NO: 32, SEQ ID NO: 34, SEQ ID NO: 36, SEQ ID NO: 38, SEQ ID NO: 40, SEQ ID NO: 44, SEQ ID NO: 46, SEQ ID NO: 48, SEQ ID NO: 50, SEQ ID NO: 52, SEQ ID NO: 54, SEQ ID NO: 56, SEQ ID NO: 58, SEQ ID NO: 60, SEQ ID NO: 62, SEQ ID NO: 64, SEQ ID NO: 66, SEQ ID NO: 68, SEQ ID NO: 70, SEQ ID NO: 72, SEQ ID NO: 74, SEQ ID NO: 76, SEQ ID NO: 78, SEQ ID NO: 80, SEQ ID NO: 82, SEQ ID NO: 84, SEQ ID NO: 86, SEQ ID NO: 88, SEQ ID NO: 90, SEQ ID NO: 92, SEQ ID NO: 94, SEQ ID NO: 96, SEQ ID NO: 98, SEQ ID NO: 100, SEQ ID NO: 102, SEQ ID NO: 106 or SEQ ID NO: 108 or by the above-described derivatives or fragments thereof which have the biological activity of these sequences, the expression level of the lines being different, for example by mutagenesis of one line and identification of a mutant with increased or reduced expression and/or activity of the abovementioned gene product in comparison with the starting line or, for example, by generating recombinant organisms, advantageously transgenic plants, plant tissues such as tissues of, for example, leaf, root, shoot or stem, plant seeds, plant calli or plant cells which functionally express the sequences described in accordance with the invention, in particular SEQ ID NO: 1, SEQ ID NO: 3, SEQ ID NO: 5, SEQ ID NO: 7, SEQ ID NO: 9, SEQ ID NO: 11, SEQ ID NO: 13, SEQ ID NO: 15, SEQ ID NO: 17, SEQ ID NO: 26, SEQ ID NO: 28, SEQ ID NO: 30, SEQ ID NO: 32, SEQ ID NO: 34, SEQ ID NO: 36, SEQ ID NO: 38, SEQ ID NO: 40, SEQ ID NO: 44, SEQ ID NO: 46, SEQ ID NO: 48, SEQ ID NO: 50, SEQ ID NO: 52, SEQ ID NO: 54, SEQ ID NO: 56, SEQ ID NO: 58, SEQ ID NO: 60, SEQ ID NO: 62, SEQ ID NO: 64, SEQ ID NO: 66, SEQ ID NO: 68, SEQ ID NO: 70, SEQ ID NO: 72, SEQ ID NO: 74, SEQ ID NO: 76, SEQ ID NO: 78, SEQ ID NO: 80, SEQ ID NO: 82, SEQ ID NO: 84, SEQ ID NO: 86, SEQ ID NO: 88, SEQ ID NO: 90, SEQ ID NO: 92, SEQ ID NO: 94, SEQ ID NO: 96, SEQ ID NO: 98, SEQ ID NO: 100, SEQ ID NO: 102, SEQ ID NO: 106 or SEQ ID NO: 108 or derivatives or fragments thereof which have the biological activity of these sequences;
[0097] b) addition of chemical compounds (which are to be tested for their herbidical activity) to the lines with the different expression or activity levels of the gene product, for example to recombinant organisms mentioned under a) and nonrecombinant starting organisms with a different, preferably lower, expression or activity level of the gene product;
[0098] c) determination of the biological activity, for example the enzymatic activity, the growth or the vitality of the two lines, for example of the recombinant organisms, in comparison with the nonrecombinant starting organisms after addition of chemical compounds in accordance with item b); and
[0099] d) selection of the chemical compounds which reduce or completely inhibit or block the biological activity, for example the enzymatic activity, the growth or the vitality of the line with the lower activity, for example which reduce or completely inhibit or block the biological activity, the growth or the vitality of the nonrecombinant organisms, of the chemical compounds determined in accordance with item c), in comparison with the treated recombinant organisms.

[0100] A herbicide which can be used in agriculture can also be identified when the recombinant organisms generated above in a) are tested in a method comprising the following steps:
[0101] (b) addition of chemical compounds to be tested for their herbicidal activity to the recombinant organisms mentioned under (a); and
[0102] (c) determination of the biological activity, for example of the enzymatic activity, the growth or the vitality of the recombinant organisms after addition of chemical compounds in accordance with (b) in comparison with the same untreated recombinant organisms; and
[0103] (d) selection of the chemical compound which reduces or completely inhibits or blocks the biological activity, for example the enzymatic activity, the growth or the vitality of the treated organisms in comparison with the untreated organisms.

[0104] Chemical compounds which reduce the biological activity, the growth or the vitality of the organisms are understood as meaning compounds which inhibit, i.e. reduce or block, the biological activity, the growth or the vitality of the organisms by at least 10%, advantageously by at least 30%, preferably by at least 50%, especially preferably by at least 70%, very especially preferably by at least 90%.

[0105] An advantageous substance is in particular a substance which damages the cell lines with low activity or, preferably, which is lethal but which does not damage, or is not lethal, for cell lines which have a higher activity of the gene product.

[0106] In general, lines of organisms can be employed in the abovementioned method which express the sequences according to the invention and in particular the gene products which are encoded by nucleic acids according to the invention, but which are not recombinant, as long as one line shows higher gene expression or activity of the gene product than another line. Such lines can occur naturally or be generated by mutageneses.

[0107] Assay systems which allow the identification of substances which suppress the formation of the gene products and/or the functions exerted by the gene products or the activity of the gene products in intact plants, plant parts, plant tissues or plant cells are known to the skilled worker. Examples which may be referred to here are test systems for the inhibition of enzymes such as the fructokinase activity as described by Tangney et al. (J. Mol. Microbiol. Biotechnol., 2 (1), 2000: 71-80), Martinez-Barajas et al. (Protein Expr. Purif., 1997, 11 (1), 41-46), Kanayama et al. (Plant Physiol., 1997, 113 (4), 1379-1384) or by Veiga-da-Cunha et al. (Protein Expr. Purif., 19 (1), 2000: 48-52). For example, such test systems can be used advantageously for what are known as inhibition assays for, for example, clone P77.

[0108] Further advantageous assay systems are, for example, fluorescence correlation spectroscopy (=FCS). With the aid of FCS (Brock et al., PNAS, 1999, 96, 10123-10128; Lamb et al., J. Phys. Org. Chem., 2000, 13654-658), it is possible to measure the diffusion of molecules over time, or to determine the difference of the bound versus free molecules. To this end, the molecules to be studied are fluorescence-labeled and, for example, a defined volume is placed into microtiter plates. The fluctuation of the molecules in the samples is driven by the Brownian motion. The translateral or rotational diffusion and conformation changes of the molecules can be monitored by a laser focussed into the sample and analyzed via a correlation. Owing to binding to other substances, the diffusion coefficient of the molecules changes. The binding of the molecules can be determined or quantified with the aid of various algorithms via the change in the diffusion coefficient. This method allows advantageous measurements to be carried out within a wide concentration range. The method is advantageously suitable for measuring recombinant proteins which are advantageously provided with what is known as a his-tag to facilitate purification via commercially available chromatography columns (Porath et al., Nature 1975, 258, 598-599). The protein purified in this way is finally provided with a fluorescence marker such as, for example, carboxytetramethylrhodamin or BODIPY® (for example, BODIPY 576/589 Angiotensin II, NEN® Life Science Products, Boston, Mass., USA). An excess of the compound or substance to be tested is subsequently added to the protein. The diffusion of the protein labeled in this way is finally determined using an FCS system (for example, ConfoCor2 with LSM 510, Carl Zeiss microscope, Jena, Germany).

[0109] A further advantageous detection method for the method according to the invention is what is known as the surface-enhanced laser desorption ionization method (=SELDI ProteinChip®). This method was first described by Hutchens and Yip (1980). Using this method, which was developed for the reproducible simultaneous identification of biomarkers or antigens (Hutchens and Yip, Rapid Commun. Mass Spectrom, 1993, 7, 576-580), the ligand-protein binding can be analyzed via mass spectrometry. Detection is via normal TOF detection (=time of flight). This method too allows recombinantly expressed proteins to be expressed and purified as described above. To carry out the measurement, the protein is immobilized on the SELDI ProteinChips®, for example via the his-tags which have already been used for purification or via ion interactions or hydrophobic interactions with the chip. The ligands are subsequently applied to the chip prepared in this way, for example using an autosampler. After one or more wash steps with buffers of various ionic strengths, the bound ligands are analyzed using the LDI laser. In doing this, the binding strength of the ligands is determined after each washing step.

[0110] A further advantageous detection method that may be mentioned is what is known as the Biacore method, where the refraction index at the surface upon binding of ligands and the protein bound to the surface is analyzed. In this method, a collection of small ligands is added sequentially to a measuring cell with the bound protein. The binding at the surface is determined by an increase in what is known as plasmon resonance (=SPR) by recording the laser refraction from the surface. In general, the change in refraction index which is determined for a change in the mass concentration at the surface, is equal for all proteins or polypeptides, that is to say this method can be used advantageously for a very wide range of proteins (Liedberg et al., Sens. Actuators, 1984, 4, 299-304). Again, as described above, recombinantly expressed proteins are used advantageously, and these proteins are bound to the Biacore chip (Uppsala, Sweden), for example via histidine residues (for example his-tag). The chip prepared in this way is again contacted with the ligands, for example with an autosampler, and the binding is measured via a detection system available from Biacore with the aid of the SPR signal, i.e. via the change in the refraction index.

[0111] The methods according to the invention have a series of advantages such as, for example:
[0112] novel potential targets for herbicidal active ingredients can be identified,
[0113] identification of herbicides which have as complete an action as possible, independently of the plant species,
[0114] substances which were generated by means of combinatorial chemistry and which can be distinguished by a great variety, but by low amounts which are available, can be tested efficiently for inhibitors of the newly identified targets
[0115] in the case of herbicides which, for example, have a very broad activity (nonselective herbicides or else selective herbicides), they permit resistance to these herbicides to be mediated to agriculturally useful plants (see description hereinbelow).

[0116] For example, substances which bind particularly specifically to, for example, a protein or protein fragment encoded by a nucleic acid whose expression is essential for the growth of the plants can be isolated using the abovementioned methods. This makes possible a simplified identification of possible inhibitors which inhibit proteins, for example in their enzyme properties, binding properties or other activities, for example also by inhibiting their processing, as described above, or which inhibit their transport within the cell or their import or export from organelles or cells. The substances identified in this way can also be applied to plants in a further step in screening methods as are known to the skilled worker and studied for their effect on the growth and the development. Thus, a selection is made from the infinite number of chemical compounds which would be suitable for a screening method, which selection makes it considerably easier for the skilled worker to identify herbicidal substances.

[0117] “Specific binding” is understood as meaning the specificity of interactions between two partners, for example proteins among themselves or between protein (enzyme) and substrate (substrate specificity). It is based on a specific molecular spatial structure. The destruction of this structure is termed denaturation, which is frequently irreversible, in most cases leading to loss of specificity. This biological activity depends greatly on the environmental conditions (buffer, temperature, contacts with nonphysiological surfaces like glass, or lack of cofactors). Enzyme-substrate or cofactor bindings, receptor-ligand bindings or antibody-antigen bindings are termed specific types of binding. In the simplest case, the enzyme-substrate interaction is described thermodynamically using the Michaelis-Menten equation. It describes the enzyme activity beyond what is known as the Michaelis-Menten constant, which, in turn, reflects the kinetics. This constant is also the unit of measurement for the enzyme activity which, in turn, reflects the specificity. Definition of the enzyme activity unit (in accordance with IUB): one unit U corresponds to the amount of enzyme which catalyzes the conversion of one micromole of substrate per minute under precisely defined experimental conditions. The specific activity is usually given in U/mg.

[0118] In a further step, the identified substances can then be applied to plants, microorganisms or cells, for example to plant cells, and the effect which they have on the metabolism of these plants can then be observed, for example enzyme activities, photosynthesis activities, metabolic activity, fixation rate, gas exchange, DNA synthesis, growth rates. These methods and many others which are known to the skilled worker are suitable for studying the viability of cells. Substances which reduce, in particular block, the growth of, for example cells, in particular plant cells, are then preferably suitable as a choice for herbicidal compositions.

[0119] Furthermore, studies into the application rates of the herbicides which have been found can be made at a very early stage. Moreover, the high specificity for, and efficacy against, weeds can be determined readily.

[0120] A multiplicity of chemicals can be tested rapidly and in a simple manner for herbicidal properties with the method according to the invention. The method allows a reproducible selection from a large number of substances of specifically those which are highly effective in order to subsequently carry out, on these substances, further in-depth tests which are familiar to the skilled worker.

[0121] The invention furthermore relates to a method of identifying inhibitors of plant proteins, which inhibitors have a potentially herbicidal action and which are encoded by the nucleic acid sequences used in the method according to the invention, by cloning the gene products, overexpressing them in a suitable expression cassette—for example in insect cells—breaking up the cells and employing the cell extract directly or after concentration or isolation of the protein in an assay system for measuring the biological activity in the presence of low-molecular-weight chemicals.

[0122] The invention therefore furthermore relates to substances identified by the methods according to the invention, the substance having a molecular weight of less than 1000 daltons, advantageously less than 900 daltons, preferably less than 800 daltons, especially preferably less than 700 daltons, very especially preferably less than 600 daltons, a Ki value preferably fewer than 1 mM and less than three hydroxyl groups on a carbon-atom-containing ring, or the substance being a proteinogenic substance, an antisense RNA, an inhibitory or an interfering RNA (RNAi).

[0123] The term “sense” refers to the strand of a double-stranded DNA which is homologous to the mRNA transcript. The “antisense” strand contains an inverted sequence which is complementary to that of the “sense” strand. For example, an antisense nucleic acid molecule comprises a nucleotide sequence which is complementary to the “sense” nucleic acid molecule which encodes a protein or an active RNA, for example complementary to the coding strand of a double-stranded cDNA molecule or complementary to an mRNA sequence. As a consequence, an antisense nucleic acid molecule can form hydrogen bonds with a sense nucleic acid molecule. The antisense nucleic acid molecule can be complementary to any of the coding strands shown here or only to part thereof. The term “coding region” refers to the region of a nucleic acid sequence whose codons are translated into amino acids. Also, the antisense nucleic acid molecule can be complementary to “noncoding regions” of the coding strand of the nucleic acid molecules shown. The term “noncoding region” refers to 5′- and 3′-sequences which flank the coding region and which are not translated into a polypeptide (for example also termed 5′- and 3′-untranslated regions). The nucleic acid molecule which encompasses an antisense sequence can also encompass further elements which are important for the expression and stability of the molecule, for example capping structures, poly-A-tails and the like.

[0124] The antisense nucleic acid molecule can be complementary to the entire coding region of an mRNA, but can also be an oligonucleotide which is complementary to only part of the coding or noncoding region of the mRNA. For example, an antisense oligonucleotide can be complementary to the region which encompasses or surrounds the translation start of the mRNA. For example, an antisense oligonucleotide can have a length of 10, 15, 20, 25, 30, 35, 40, 45 or 50 nucleotides. An antisense nucleic acid molecule can be generated by chemical synthesis and enzymatic ligation by methods known to the skilled worker. An antisense nucleic acid molecule can be synthesized chemically using naturally occurring nucleotides or nucleotides which have been modified in various ways, so that the biological stability of the molecules is increased or the physical stability of the duplex which forms between the antisense and sense nucleic acid is increased; for example, phosphorothioate derivatives and acridin-substituted nucleotides can be used. Examples of modified nucleotides which can be used for the generation of antisense nucleic acids encompass 5-fluorouracil, 5-bromouracil, 5-chlorouracil, 5-iodouracil, hypoxanthine, xanthine, 4-acetylcytosine, 5-(carboxyhydroxylmethyl)uracil, 5-carboxy-methylaminomethyl-2-thiouridine, 5-carboxymethylamino-methyluracil, dihydrouracil, beta-D-galactosylqueosine, inosine, N6-isopentenyladenine, 1-methylguanine, 1-methylinosine, 2,2-dimethylguanine, 2-methyladenine, 2-methylguanine, 3-methylcytosine, 5-methylcytosine, N6-adenine, 7-methylguanine, 5-methylaminomethyluracil, 5-methoxyaminomethyl-2-thiouracil, beta-D-mannosylqueosine, 5′-methoxycarboxymethyluracil, 5-methoxyuracil, 2-methylthio-N6-isopentenyladenine, uracil-5-oxyacetic acid (v), wybutoxosine, pseudouracil, queosine, 2-thiocytosine, 5-methyl-2-thiouracil, 2-thiouracil, 4-thiouracil, 5-methyluracil, uracil-5-oxyaceticacidmethylester, uracil-5-oxyacetic acid (v), 5-methyl-2-thiouracil, 3-(3-amino-3-N-2-carboxypropyl)uracil, (acp3)w, and 2,6-diaminopurine.

[0125] As an alternative, antisense nucleic acid molecules can be prepared biologically using expression vectors into which polynucleotides with the opposite orientation have been cloned (so that RNA transcribed from the inserted polynucleotide is in antisense orientation relative to a target polynucleotide as has been described further above).

[0126] The antisense nucleic acid molecule can also be an “α-anomeric” nucleic acid molecule. An “α-anomeric” nucleic acid molecule forms specific double-strand hybrids with complementary RNAs in which the strands run in parallel with each other, in contrast to ordinary β units. The antisense nucleic acid molecule can encompass 2-0-methylribonucleotides or chimeric RNA-DNA-analogs.

[0127] Moreover, the antisense nucleic acid molecule can be a ribozyme. Ribozymes are catalytic RNA molecules with a ribonuclease activity which are capable of cleaving single-stranded nucleic acids, such as, for example, mRNA, to which they have a complementary region. Ribozymes (for example hammerhead ribozymes) can be used for catalytically or noncatalytically cleaving mRNA of the sequences described herein, thus preventing translation of the mRNA. A ribozyme which is specific for one of the nucleic acid sequences mentioned herein can be constructed on the basis of the cDNA sequences shown herein or on the basis of heterologous sequences which can be identified by the methods described herein. For example, a derivative of the Tetrahymena L-19 IVSRNA can be prepared by the nucleotide sequence of the active region being complementary to the nucleotide sequence which is cleaved in a coding mRNA. As an alternative, one of the coding or noncoding sequences described herein or of an mRNA thereof may also be used in order to select a catalytic RNA from an RNA pool (see, for example, Bartel, 1993, Science, 261, 1411). As an alternative, the expression can also be inhibited by nucleotide sequences which are complementary to a regulatory region of the nucleic acid sequences described herein (for example a promoter or enhancer) forming a triple-helical structure, which prevents transcription of the subsequent gene (for example Helene, 1991, Anticancer-Drug Des. 6, 596; Helene, 1992, Ann. NY Acad. Sci. 660, 27, or Maher, 1992, Bioassays, 14, 807).

[0128] “Antibodies” are understood as meaning, for example, polyclonal, monoclonal, human or humanized or recombinant antibodies or fragments thereof, single-chain antibodies or else synthetic antibodies. Antibodies according to the invention or fragments thereof are understood as meaning, in principle, all classes of immunoglobulins such as IgM, IgG, IgD, IgE, IgA or their subclasses such as the subclasses of IgG or their mixtures. Preferred are IgG and its subclasses such as, for example, IgG₁, IgG₂, IgG₂ₐ, IgG_{2b}, IgG₃ or IgG_{M}. Especially preferred are the IgG subtypes IgG₁ or IgG_{2b}. Fragments which may be mentioned are all truncated or modified antibody fragments with one or two binding sites which are complementary to the antigen, such as antibody portions with a binding site formed by light and heavy chain which corresponds to the antibody, such as Fv, Fab or F(ab′)₂ fragments or single-strand fragments. Preferred are truncated double-strand fragments such as Fv, Fab or F(ab′)₂. These fragments can be obtained, for example, via the enzymatic route by cleaving off the Fc portion of the antibodies using enzymes such as papain or pepsine, by chemical oxidation or by genetic manipulation of the antibody genes. Genetically engineered nontruncated fragments may also be used advantageously. The antibodies or fragments can be used alone or in mixtures. Antibodies can also be part of a fusion protein.

[0129] The substances identified can be chemically synthesized or microbiologically produced substances which may be found, for example, in cell extracts of, for example, plants, animals or microorganisms. Furthermore, while the substances mentioned may be known in the prior art, they may not be known as yet as herbicides. The reaction mixture can be a cell-free extract or encompass a cell or cell culture. Suitable methods are known to the skilled worker and are described generally, for example, in Alberts, Molecular Biology the cell, 3^{rd} Edition (1994), for example chapter 17. The substances mentioned may, for example, be added to the reaction mixture or the culture medium or injected into the cells or sprayed onto a plant.

[0130] Once a sample comprising an active substance identified by the method according to the invention has been identified, it is either possible to isolate the substance directly from the original sample, or the sample can be divided into different groups, for example when it is composed of a multiplicity of different components, in order to reduce the number of the different substances per sample and then to repeat the method according to the invention with such a “subsample” of the original sample. Depending on the complexity of the sample, the above-described steps can be repeated several times, preferably until the sample identified in accordance with the method according to the invention only encompasses a small number of substances or just one substance. Preferably, the substance identified in accordance with the method according to the invention, or derivatives of the substance, are formulated further so that it is suitable for use in plant breeding or in plant cell or tissue culture.

[0131] The substances which were tested and identified in accordance with the method according to the invention can be: expression libraries, for example cDNA expression libraries, peptides, proteins, nucleic acids, antibodies, small organic substances, hormones, PNAs or similar (Milner, Nature Medicin 1 (1995), 879-880; Hupp, Cell. 83 (1995), 237-245; Gibbs, Cell. 79 (1994), 193-198 and references cited therein). These substances can also be functional derivatives or analogs of the known inhibitors or activators. Methods for the preparation of chemical derivatives or analogs are known to the skilled worker. The abovementioned derivatives and analogs can be tested by prior-art methods. Moreover, computer-aided design or peptidomimetics can be used for preparing suitable derivatives and analogs. The cell or the tissue which can be used for the method according to the invention is preferably a host cell, plant cell or plant tissue according to the invention as described in the abovementioned embodiments.

[0132] Derivative(s) (the plural and the singular are to be taken as equivalent for the present application and its definitions) of the nucleic acids used in the methods according to the invention are, for example, functional homologs of the proteins encoded by SEQ ID NO: 1, SEQ ID NO: 3, SEQ ID NO: 5, SEQ ID NO: 7, SEQ ID NO: 9, SEQ ID No: 11, SEQ ID No: 13, SEQ ID No: 15, SEQ ID NO: 17, SEQ ID NO: 26, SEQ ID NO: 28, SEQ ID NO: 30, SEQ ID NO: 32, SEQ ID NO: 34, SEQ ID NO: 36, SEQ ID NO: 38, SEQ ID NO: 40, SEQ ID NO: 44, SEQ ID NO: 46, SEQ ID NO: 48, SEQ ID NO: 50, SEQ ID NO: 52, SEQ ID NO: 54, SEQ ID NO: 56, SEQ ID NO: 58, SEQ ID NO: 60, SEQ ID NO: 62, SEQ ID NO: 64, SEQ ID NO: 66, SEQ ID NO: 68, SEQ ID NO: 70, SEQ ID NO: 72, SEQ ID NO: 74, SEQ ID NO: 76, SEQ ID NO: 78, SEQ ID NO: 80, SEQ ID NO: 82, SEQ ID NO: 84, SEQ ID NO: 86, SEQ ID NO: 88, SEQ ID NO: 90, SEQ ID NO: 92, SEQ ID NO: 94, SEQ ID NO: 96, SEQ ID NO: 98, SEQ ID NO: 100, SEQ ID NO: 102, SEQ ID NO: 106 or SEQ ID NO: 108 or their biological activity, that is to say proteins which carry out the same biological reactions as the proteins encoded by SEQ ID NO: 1, SEQ ID NO: 3, SEQ ID NO: 5, SEQ ID NO: 7, SEQ ID NO: 9, SEQ ID No: 11, SEQ ID No: 13, SEQ ID No: 15, SEQ ID NO: 17, SEQ ID NO: 26, SEQ ID NO: 28, SEQ ID NO: 30, SEQ ID NO: 32, SEQ ID NO: 34, SEQ ID NO: 36, SEQ ID NO: 38, SEQ ID NO: 40, SEQ ID NO: 44, SEQ ID NO: 46, SEQ ID NO: 48, SEQ ID NO: 50, SEQ ID NO: 52, SEQ ID NO: 54, SEQ ID NO: 56, SEQ ID NO: 58, SEQ ID NO: 60, SEQ ID NO: 62, SEQ ID NO: 64, SEQ ID NO: 66, SEQ ID NO: 68, SEQ ID NO: 70, SEQ ID NO: 72, SEQ ID NO: 74, SEQ ID NO: 76, SEQ ID NO: 78, SEQ ID NO: 80, SEQ ID NO: 82, SEQ ID NO: 84, SEQ ID NO: 86, SEQ ID NO: 88, SEQ ID NO: 90, SEQ ID NO: 92, SEQ ID NO: 94, SEQ ID NO: 96, SEQ ID NO: 98, SEQ ID NO: 100, SEQ ID NO: 102, SEQ ID NO: 106 or SEQ ID NO: 108. These derivatives or genes are also suitable as herbicide targets.

[0133] The sequences described herein in accordance with the invention encode homologs with the proteins described in the examples and preferably have the activities specified for the homologs.

[0134] SEQ ID NO: 1 encodes a protein which has similarities with an m6A methyl transferase whose protein sequence is shown in SEQ ID NO: 2. SEQ ID NO: 3 encodes what is known as the “DNA-repair-protein-RAD-54-like-protein homolog”, whose protein sequence can be seen from SEQ ID NO: 4. SEQ ID NO: 5 can encode a thioredoxin, the protein sequence is represented in SEQ ID NO: 6. SEQ ID NO: 7 encodes an unknown protein whose sequence is shown in SEQ ID NO: 2. SEQ ID NO: 9 preferably encodes a fructokinase whose protein sequence can be seen from SEQ ID NO: 10. SEQ ID NO: 11 encodes a protein with weak homologies with various zinc finger proteins. The protein sequence can be seen from SEQ ID NO: 12. A protein which has similarities with LYTB proteins is encoded by SEQ ID NO: 13. SEQ ID NO: 14 indicates the protein sequence. Sequence SEQ ID NO: 15 encodes a protein with the sequence shown in SEQ ID NO: 16. This hypothetical protein encoded by SEQ ID NO: 15 contains what is known as a crepropin family signature and has weak homologies with myc protooncogenes. SEQ ID NO: 17 encodes a protein which has a certain homology with a leucine-rich human protein. The protein sequence can be seen from SEQ ID NO: 18. The nucleic acids SEQ ID NO: 26, SEQ ID NO: 28, SEQ ID NO: 30, SEQ ID NO: 32, SEQ ID NO: 34, SEQ ID NO: 36, SEQ ID NO: 38, SEQ ID NO: 40, SEQ ID NO: 44, SEQ ID NO: 46, SEQ ID NO: 48, SEQ ID NO: 50, SEQ ID NO: 52, SEQ ID NO: 54, SEQ ID NO: 56, SEQ ID NO: 58, SEQ ID NO: 60, SEQ ID NO: 62, SEQ ID NO: 64, SEQ ID NO: 66, SEQ ID NO: 68, SEQ ID NO: 70, SEQ ID NO: 72, SEQ ID NO: 74, SEQ ID NO: 76, SEQ ID NO: 78, SEQ ID NO: 80, SEQ ID NO: 82, SEQ ID NO: 84, SEQ ID NO: 86, SEQ ID NO: 88, SEQ ID NO: 90, SEQ ID NO: 92, SEQ ID NO: 94, SEQ ID NO: 96, SEQ ID NO: 98, SEQ ID NO: 100, SEQ ID NO: 102, SEQ ID NO: 106 or SEQ ID NO: 108 encode homologs or have similarity with proteins whose activity or function is shown above or in the examples. Each of the protein sequences is shown in SEQ ID NO: 27, SEQ ID NO: 29, SEQ ID NO: 31, SEQ ID NO: 33, SEQ ID NO: 35, SEQ ID NO: 37, SEQ ID NO: 39, SEQ ID NO: 41, SEQ ID NO: 45, SEQ ID NO: 47, SEQ ID NO: 49, SEQ ID NO: 51, SEQ ID NO: 53, SEQ ID NO: 55, SEQ ID NO: 57, SEQ ID NO: 59, SEQ ID NO: 61, SEQ ID NO: 63, SEQ ID NO: 65, SEQ ID NO: 67, SEQ ID NO: 69, SEQ ID NO: 71, SEQ ID NO: 73, SEQ ID NO: 75, SEQ ID NO: 77, SEQ ID NO: 79, SEQ ID NO: 81, SEQ ID NO: 83, SEQ ID NO: 85, SEQ ID NO: 87, SEQ ID NO: 89, SEQ ID NO: 91, SEQ ID NO: 93, SEQ ID NO: 95, SEQ ID NO: 97, SEQ ID NO: 99, SEQ ID NO: 101, SEQ ID NO: 103, SEQ ID NO: 105, SEQ ID NO: 107 or SEQ ID NO: 109.

[0135] Derivatives are also understood as meaning those peptides which have at least 20%, or preferably 30%, more preferably 50%, even more preferably 70%, more preferably 80%, most preferably 90% or more homology with the polypeptides with the sequences shown in SEQ ID NO: 1, SEQ ID NO: 3, SEQ ID NO: 5, SEQ ID NO: 7, SEQ ID NO: 9, SEQ ID NO: 11, SEQ ID NO: 13, SEQ ID NO: 15, SEQ ID NO: 17, SEQ ID NO: 26, SEQ ID NO: 28, SEQ ID NO: 30, SEQ ID NO: 32, SEQ ID NO: 34, SEQ ID NO: 36, SEQ ID NO: 38, SEQ ID NO: 40, SEQ ID NO: 44, SEQ ID NO: 46, SEQ ID NO: 48, SEQ ID NO: 50, SEQ ID NO: 52, SEQ ID NO: 54, SEQ ID NO: 56, SEQ ID NO: 58, SEQ ID NO: 60, SEQ ID NO: 62, SEQ ID NO: 64, SEQ ID NO: 66, SEQ ID NO: 68, SEQ ID NO: 70, SEQ ID NO: 72, SEQ ID NO: 74, SEQ ID NO: 76, SEQ ID NO: 78, SEQ ID NO: 80, SEQ ID NO: 82, SEQ ID NO: 84, SEQ ID NO: 86, SEQ ID NO: 88, SEQ ID NO: 90, SEQ ID NO: 92, SEQ ID NO: 94, SEQ ID NO: 96, SEQ ID NO: 98, SEQ ID NO: 100, SEQ ID NO: 102, SEQ ID NO: 106 or SEQ ID NO: 108, and which have an equivalent biological activity in other organisms and can thus be regarded as functional homologs. This functional homology or equivalence can be demonstrated for example by the possible complementation of mutants in these functions.

[0136] The abovementioned nucleic acid sequence(s) or fragments thereof can be used advantageously for isolating further sequences such as, for example, genomic, cDNA or other sequences which are suitable as herbicide target, using homology screening.

[0137] The abovementioned derivatives can be isolated, for example, from other organisms, in particular eukaryotic organisms such as plants, such as, specifically, algae, mosses, dinoflagellates or fungi.

[0138] Derivatives or functional derivatives of the sequences stated in SEQ ID NO: 1, SEQ ID NO: 3, SEQ ID NO: 5, SEQ ID NO: 7, SEQ ID NO: 9, SEQ ID NO: 11, SEQ ID NO: 13, SEQ ID NO: 15, SEQ ID NO: 17, SEQ ID NO: 26, SEQ ID NO: 28, SEQ ID NO: 30, SEQ ID NO: 32, SEQ ID NO: 34, SEQ ID NO: 36, SEQ ID NO: 38, SEQ ID NO: 40, SEQ ID NO: 44, SEQ ID NO: 46, SEQ ID NO: 48, SEQ ID NO: 50, SEQ ID NO: 52, SEQ ID NO: 54, SEQ ID NO: 56, SEQ ID NO: 58, SEQ ID NO: 60, SEQ ID NO: 62, SEQ ID NO: 64, SEQ ID NO: 66, SEQ ID NO: 68, SEQ ID NO: 70, SEQ ID NO: 72, SEQ ID NO: 74, SEQ ID NO: 76, SEQ ID NO: 78, SEQ ID NO: 80, SEQ ID NO: 82, SEQ ID NO: 84, SEQ ID NO: 86, SEQ ID NO: 88, SEQ ID NO: 90, SEQ ID NO: 92, SEQ ID NO: 94, SEQ ID NO: 96, SEQ ID NO: 98, SEQ ID NO: 100, SEQ ID NO: 102, SEQ ID NO: 106 or SEQ ID NO: 108 are furthermore to be understood as meaning, for example, allelic variants which have at least 60% homology, advantageously at least 70% homology, preferably at least 80% homology, especially preferably at least 85% homology, very especially preferably 90% homology at the derived amino acid level. The homology was calculated over the entire amino acid region. The programs PileUp, BESTFIT, GAP, TRANSLATE or BACKTRANSLATE (=part of the UWGCG package, Wisconsin Package, Version 10.0-UNIX, January 1999, Genetics Computer Group, Inc., Deverux et al., Nucleic. Acid Res., 12, 1984: 387-395) were used (J. Mol. Evolution., 25, 351-360, 1987, Higgins et al., CABIOS, 5 1989: 151-153). The amino acid sequences derived from the abovementioned nucleic acids can be seen from SEQ ID NO: 2, SEQ ID NO: 4, SEQ ID NO: 6, SEQ ID NO: 8, SEQ ID NO: 12, SEQ ID NO: 14, SEQ ID NO: 16, SEQ ID NO: 18, SEQ ID NO: 27, SEQ ID NO: 29, SEQ ID NO: 31, SEQ ID NO: 33, SEQ ID NO: 35, SEQ ID NO: 37, SEQ ID NO: 39, SEQ ID NO: 41, SEQ ID NO: 45, SEQ ID NO: 47, SEQ ID NO: 49, SEQ ID NO: 51, SEQ ID NO: 53, SEQ ID NO: 55, SEQ ID NO: 57, SEQ ID NO: 59, SEQ ID NO: 61, SEQ ID NO: 63, SEQ ID NO: 65, SEQ ID NO: 67, SEQ ID NO: 69, SEQ ID NO: 71, SEQ ID NO: 73, SEQ ID NO: 75, SEQ ID NO: 77, SEQ ID NO: 79, SEQ ID NO: 81, SEQ ID NO: 83, SEQ ID NO: 85, SEQ ID NO: 87, SEQ ID NO: 89, SEQ ID NO: 91, SEQ ID NO: 93, SEQ ID NO: 95, SEQ ID NO: 97, SEQ ID NO: 99, SEQ ID NO: 101, SEQ ID NO: 103, SEQ ID NO: 105, SEQ ID NO: 107 or SEQ ID NO: 109. Homology is to be understood as meaning identity, that is to say that the amino acid sequences have at least 40, 50, 60 or 70%, more preferably 80%, even more preferably 90%, most preferably 95% or more identity. The sequences according to the invention have at least 45 or 55%, preferably at least 60 or 65%, especially preferably 75%, very especially preferably at least 80%, even more preferably 90 or 95% or more homology at the nucleic acid level.

[0139] The term derivatives and the term “fragments” furthermore also encompass subregions or fragments of the abovementioned sequences or their homologous sequences of at least 50 amino acids, advantageously of at least 40 amino acids, preferably of at least 30 amino acids, especially preferably of at least 20 amino acids, very especially preferably of at least 10 amino acids, which make it possible selectively to identify interacting substances. The term “fragment”, “sequence fragment” or “part-sequence” denotes a truncated sequence of the original sequence. The truncated sequence (nucleic acid or protein) can have different lengths, the minimum sequence length being a sequence length which has at least one comparable function, for example binding properties, or activity of the original sequence. Such methods are, for example, SELDI, FCS or Biocore as described above, which are known to the skilled worker.

[0140] Equally encompassed are thus nucleic acids which encode a fragment or an epitope of a polypeptide which specifically binds to an antibody which specifically binds to a polypeptide described in accordance with the invention, in particular which is encoded by one of the sequences shown in SEQ ID NO: 1, SEQ ID NO: 3, SEQ ID NO: 5, SEQ ID NO: 7, SEQ ID NO: 9, SEQ ID NO: 11, SEQ ID NO: 13, SEQ ID NO: 15, SEQ ID NO: 17, SEQ ID NO: 26, SEQ ID NO: 28, SEQ ID NO: 30, SEQ ID NO: 32, SEQ ID NO: 34, SEQ ID NO: 36, SEQ ID NO: 38, SEQ ID NO: 40, SEQ ID NO: 44, SEQ ID NO: 46, SEQ ID NO: 48, SEQ ID NO: 50, SEQ ID NO: 52, SEQ ID NO: 54, SEQ ID NO: 56, SEQ ID NO: 58, SEQ ID NO: 60, SEQ ID NO: 62, SEQ ID NO: 64, SEQ ID NO: 66, SEQ ID NO: 68, SEQ ID NO: 70, SEQ ID NO: 72, SEQ ID NO: 74, SEQ ID NO: 76, SEQ ID NO: 78, SEQ ID NO: 80, SEQ ID NO: 82, SEQ ID NO: 84, SEQ ID NO: 86, SEQ ID NO: 88, SEQ ID NO: 90, SEQ ID NO: 92, SEQ ID NO: 94, SEQ ID NO: 96, SEQ ID NO: 98, SEQ ID NO: 100, SEQ ID NO: 102, SEQ ID NO: 106 oder SEQ ID NO: 108. Fragments or epitopes of a polypeptide which specifically interact with such an antibody have a significant homology with regard to the spatial structure to the polypeptides described herein, at least in subregions. Preferably, they also have high homology at the amino acid level with the abovementioned sequences, preferably 20%, with 40% being more preferred, 60% more preferred, 80% even more preferred, but 90% or more being most preferred. The spatial structure of a polypeptide, however, is essentially one of the factors responsible for the interactions of the polypeptide with other compounds and, if appropriate, for its enzymatic activity. Accordingly, fragments may be employed in the processes according to the invention whose sequence has only a low degree of homology with the above-described polypeptides, but whose spatial structure has a high degree of homology with the above-described polypeptides, that is to say those comprising epitopes of the sequences described herein, in order to find interactants which then inhibit or inactivate the polypeptides described herein. Fragments which encompass epitopes of the polypeptides according to the invention can also be used to “occupy” the interactants of the polypeptides according to the invention, i.e. to prevent their interaction with the polypeptides according to the invention. To this end, it is advantageous for the fragments to have a greater affinity to a binding partner than the naturally occurring polypeptide. Likewise encompassed are fragments which are encoded by nucleic acids according to the invention and which encompass one of the abovementioned biological activities.

[0141] Allelic variants encompass in particular functional variants which can be obtained from the sequence shown in SEQ ID NO: 1, SEQ ID NO: 3, SEQ ID NO: 5; SEQ ID NO: 7, SEQ ID NO: 9, SEQ ID NO: 11, SEQ ID NO: 13, SEQ ID NO: 15, SEQ ID NO: 17, SEQ ID NO: 26, SEQ ID NO: 28, SEQ ID NO: 30, SEQ ID NO: 32, SEQ ID NO: 34, SEQ ID NO: 36, SEQ ID NO: 38, SEQ ID NO: 40, SEQ ID NO: 44, SEQ ID NO: 46, SEQ ID NO: 48, SEQ ID NO: 50, SEQ ID NO: 52, SEQ ID NO: 54, SEQ ID NO: 56, SEQ ID NO: 58, SEQ ID NO: 60, SEQ ID NO: 62, SEQ ID NO: 64, SEQ ID NO: 66, SEQ ID NO: 68, SEQ ID NO: 70, SEQ ID NO: 72, SEQ ID NO: 74, SEQ ID NO: 76, SEQ ID NO: 78, SEQ ID NO: 80, SEQ ID NO: 82, SEQ ID NO: 84, SEQ ID NO: 86, SEQ ID NO: 88, SEQ ID NO: 90, SEQ ID NO: 92, SEQ ID NO: 94, SEQ ID NO: 96, SEQ ID NO: 98, SEQ ID NO: 100, SEQ ID NO: 102, SEQ ID NO: 106 or SEQ ID NO: 108 by deletion, insertion or substitution of nucleotides, the biological, e.g. enzymatic activity or binding properties of the derived proteins which are synthesized being retained.

[0142] Starting from, for example, the DNA sequences described in SEQ ID NO: 1, SEQ ID NO: 3, SEQ ID NO: 5, SEQ ID NO: 7, SEQ ID NO: 9, SEQ ID NO: 11, SEQ ID NO: 13, SEQ ID NO: 15, SEQ ID NO: 17, SEQ ID NO: 26, SEQ ID NO: 27, SEQ ID NO: 30, SEQ ID NO: 32, SEQ ID NO:.34, SEQ ID NO: 36, SEQ ID NO: 38, SEQ ID NO: 40, SEQ ID NO: 44, SEQ ID NO: 46, SEQ ID NO: 48, SEQ ID NO: 50, SEQ ID NO: 52, SEQ ID NO: 54, SEQ ID NO: 56, SEQ ID NO: 58, SEQ ID NO: 60, SEQ ID NO: 62, SEQ ID NO: 64, SEQ ID NO: 66, SEQ ID NO: 68, SEQ ID NO: 70, SEQ ID NO: 72, SEQ ID NO: 74, SEQ ID NO: 76, SEQ ID NO: 78, SEQ ID NO: 80, SEQ ID NO: 82, SEQ ID NO: 84, SEQ ID NO: 86, SEQ ID NO: 88, SEQ ID NO: 90, SEQ ID NO: 92, SEQ ID NO: 94, SEQ ID NO: 96, SEQ ID NO: 98, SEQ ID NO: 100, SEQ ID NO: 102, SEQ ID NO: 106 or SEQ ID NO: 108 or portions of these sequences, such DNA sequences can be isolated from other eukaryotic organisms such as, for example, microorganisms such as yeasts, fungi, ciliates, plants such as algae, mosses or other plants, with the aid of the nucleic acid sequences according to the invention, for example using customary hybridization methods or PCR technology. These DNA sequences hybridize with the abovementioned sequences under standard conditions. For hybridization, it is advantageous to use short oligonucleotides, for example of the conserved or other regions, which can be determined via alignment with other related genes in the manner known to the skilled worker. However, longer fragments of the nucleic acids according to the invention or the complete sequences may also be used for hybridization. These standard conditions vary depending on the nucleic acid used: oligonucleotide, longer fragment or complete sequence, or on the type of nucleic acid, DNA or RNA, which is used for the hybridization. Thus, for example, the melting points for DNA:DNA hybrids are approximately 10° C. lower than those of DNA:RNA hybrids of the same length.

[0143] Standard conditions are to be understood as meaning, for example, temperatures between 42 and 58° C. in an aqueous buffer solution with a concentration of between 0.1 to 5×SSC (1×SSC=0.15 M NaCl, 15 mM sodium citrate, pH 7.2) or additionally in the presence of 50% formamide such as, for example, 42° C. in 5×SSC, 50% formamide, depending on the nucleic acid. The hybridization conditions for DNA:DNA hybrids are advantageously 0.1×SSC and temperatures of between approximately 20° C. and 45° C., preferably between approximately 30° C. and 45° C. For DNA:RNA hybrids, the hybridization conditions are advantageously 0.1×SSC and temperatures of between approximately 30° C. and 55° C., preferably between approximately 45° C. and 55° C. These temperatures stated for the hybridization are examples of calculated melting point values for a nucleic acid with a length of approximately 100 nucleotides and a G+C content of 50% in the absence of formamide. The experimental conditions for DNA hybridization are described in specialist textbooks of genetics such as, for example, Sambrook et al., “Molecular Cloning”, Cold Spring Harbor Laboratory, 1989, and can be calculated by formulae known to the skilled worker, for example as a function of the length of the nucleic acids, the type of the hybrids or the G+C content. The skilled worker will find further information on hybridization in the following textbooks: Ausubel et al. (eds), 1985, Current Protocols in Molecular Biology, John Wiley & Sons, New York; Hames and Higgins (eds), 1985, Nucleic Acids Hybridization: A Practical Approach, IRL Press at Oxford University Press, Oxford; Brown (ed), 1991, Essential Molecular Biology: A Practical Approach, IRL Press at Oxford University Press, Oxford.

[0144] Derivatives are furthermore to be understood as meaning homologs of the sequence SEQ ID No: 1, SEQ ID NO: 3, SEQ ID No: 5, SEQ ID No: 7, SEQ ID NO: 9, SEQ ID NO: 11, SEQ ID NO: 13, SEQ ID NO: 15, SEQ ID NO: 17, SEQ ID NO: 26, SEQ ID NO: 28, SEQ ID NO: 30, SEQ ID NO: 32, SEQ ID NO: 34, SEQ ID NO: 36, SEQ ID NO: 38, SEQ ID NO: 40, SEQ ID NO: 44, SEQ ID NO: 46, SEQ ID NO: 48, SEQ ID NO: 50, SEQ ID NO: 52, SEQ ID NO: 54, SEQ ID NO: 56, SEQ ID NO: 58, SEQ ID NO: 60, SEQ ID NO: 62, SEQ ID NO: 64, SEQ ID NO: 66, SEQ ID NO: 68, SEQ ID NO: 70, SEQ ID NO: 72, SEQ ID NO: 74, SEQ ID NO: 76, SEQ ID NO: 78, SEQ ID NO: 80, SEQ ID NO: 82, SEQ ID NO: 84, SEQ ID NO: 86, SEQ ID NO: 88, SEQ ID NO: 90, SEQ ID NO: 92, SEQ ID NO: 94, SEQ ID NO: 96, SEQ ID NO: 98, SEQ ID NO: 100, SEQ ID NO: 102, SEQ ID NO: 106 or SEQ ID NO: 108 for example eukaryotic homologs, truncated sequences, simplex DNA of the coding and noncoding DNA sequence or RNA of the coding and noncoding DNA sequence.

[0145] Homologs of the sequences SEQ ID NO: 1, SEQ ID NO: 3, SEQ ID No: 5, SEQ ID No: 7, SEQ ID NO: 9, SEQ ID NO: 11, SEQ ID NO: 13, SEQ ID NO: 15, SEQ ID NO: 17, SEQ ID NO: 26, SEQ ID NO: 28, SEQ ID NO: 30, SEQ ID NO: 32, SEQ ID NO: 34, SEQ ID NO: 36, SEQ ID NO: 38, SEQ ID NO: 40, SEQ ID NO: 44, SEQ ID NO: 46, SEQ ID NO: 48, SEQ ID NO: 50, SEQ ID NO: 52, SEQ ID NO: 54, SEQ ID NO: 56, SEQ ID NO: 58, SEQ ID NO: 60, SEQ ID NO: 62, SEQ ID NO: 64, SEQ ID NO: 66, SEQ ID NO: 68, SEQ ID NO: 70, SEQ ID NO: 72, SEQ ID NO: 74, SEQ ID NO: 76, SEQ ID NO: 78, SEQ ID NO: 80, SEQ ID NO: 82, SEQ ID NO: 84, SEQ ID NO: 86, SEQ ID NO: 88, SEQ ID NO: 90, SEQ ID NO: 92, SEQ ID NO: 94, SEQ ID NO: 96, SEQ ID NO: 98, SEQ ID NO: 100, SEQ ID NO: 102, SEQ ID NO: 106 or SEQ ID NO: 108 are furthermore understood as meaning derivatives such as, for example, variants from other organisms, for example other plants. These variants can be modified by one or more nucleotide substitutions, by insertion(s) and/or deletion(s) without, however, adversely affecting the functionality or biological activity of the variants. They preferably have a homology of at least 20% and an equivalent biological activity.

[0146] The nucleic acids SEQ ID NO: 1, SEQ ID NO: 3, SEQ ID No: 5, SEQ ID No: 7, SEQ ID NO: 9, SEQ ID NO: 11, SEQ ID NO: 13, SEQ ID NO: 15, SEQ ID NO: 17, SEQ ID NO: 26, SEQ ID NO: 28, SEQ ID NO: 30, SEQ ID NO: 32, SEQ ID NO: 34, SEQ ID NO: 36, SEQ ID NO: 38, SEQ ID NO: 40, SEQ ID NO: 44, SEQ ID NO: 46, SEQ ID NO: 48, SEQ ID NO: 50, SEQ ID NO: 52, SEQ ID NO: 54, SEQ ID NO: 56, SEQ ID NO: 58, SEQ ID NO: 60, SEQ ID NO: 62, SEQ ID NO: 64, SEQ ID NO: 66, SEQ ID NO: 68, SEQ ID NO: 70, SEQ ID NO: 72, SEQ ID NO: 74, SEQ ID NO: 76, SEQ ID NO: 78, SEQ ID NO: 80, SEQ ID NO: 82, SEQ ID NO: 84, SEQ ID NO: 86, SEQ ID NO: 88, SEQ ID NO: 90, SEQ ID NO: 92, SEQ ID NO: 94, SEQ ID NO: 96, SEQ ID NO: 98, SEQ ID NO: 100, SEQ ID NO: 102, SEQ ID NO: 106 oder SEQ ID NO: 108, and their fragments and derivatives which are used in the method according to the invention are therefore advantageously suitable for isolating further essential, novel genes from other organisms, preferably plants.

[0147] The nucleic acid sequences according to the invention SEQ ID NO: 1, SEQ ID NO: 3, SEQ ID No: 5, SEQ ID No: 7, SEQ ID NO: 9, SEQ ID NO: 11, SEQ ID NO: 13, SEQ ID NO: 15, SEQ ID NO: 17, SEQ ID NO: 26, SEQ ID NO: 28, SEQ ID NO: 30, SEQ ID NO: 32, SEQ ID NO: 34, SEQ ID NO: 36, SEQ ID NO: 38, SEQ ID NO: 40, SEQ ID NO: 44, SEQ ID NO: 46, SEQ ID NO: 48, SEQ ID NO: 50, SEQ ID NO: 52, SEQ ID NO: 54, SEQ ID NO: 56, SEQ ID NO: 58, SEQ ID NO: 60, SEQ ID NO: 62, SEQ ID NO: 64, SEQ ID NO: 66, SEQ ID NO: 68, SEQ ID NO: 70, SEQ ID NO: 72, SEQ ID NO: 74, SEQ ID NO: 76, SEQ ID NO: 78, SEQ ID NO: 80, SEQ ID NO: 82, SEQ ID NO: 84, SEQ ID NO: 86, SEQ ID NO: 88, SEQ ID NO: 90, SEQ ID NO: 92, SEQ ID NO: 94, SEQ ID NO: 96, SEQ ID NO: 98, SEQ ID NO: 100, SEQ ID NO: 102, SEQ ID NO: 106 or SEQ ID NO: 108 whose gene products which are encoded by them are used in the method according to the invention can be of synthetic or natural origin or comprise a mixture of synthetic and natural DNA components, or else be composed of various heterologous gene segments of different organisms. In general, synthetic nucleotide sequences are prepared which have codons which are preferred by the host organisms in question, for example plants. As a rule, this leads to optimal expression of the heterologous genes. These codons which are preferred by plants can be determined from codons with the highest protein frequency which are expressed in most of the plant species of interest. An example of Corynebacterium glutamicum is provided in: Wada et al. (1992) Nucleic Acids Res. 20:2111-2118). Such experiments can be carried out with the aid of standard methods and are known to those skilled in the art.

[0148] Functionally equivalent sequences which encode the nucleic acids used in the method according to the invention are those derivatives of the sequences according to the invention which, despite deviating nucleotide sequence, retain the desired functions, that is to say the biological activity of the proteins. Functional equivalents thus encompass naturally occurring variants of the sequences described herein, and also artificial nucleotide sequences, for example artificial nucleotide sequences which have been obtained by chemical synthesis and which are, in particular, adapted to the codon usage of a plant.

[0149] Furthermore suitable are artificial DNA sequences as long as, as described above, they lead to products which mediate the abovementioned activities or the desired property, for example binding to a receptor or the enzymatic activity. Such artificial DNA sequences can be determined, for example, by backtranslating proteins which have been constructed by means of molecular modeling, or by in vitro selection. Possible techniques for the in-vitro evolution of DNA for modifying or improving the DNA sequences are described by Patten, P. A. et al., Current Opinion in Biotechnology 8, 724-733(1997) or by Moore, J. C. et al., Journal of Molecular Biology 272, 336-347( 1997). Especially suitable are coding DNA sequences which are obtained by backtranslating a polypeptide sequence in accordance with the codon usage which is specific for the host plant. The specific codon usage can be determined readily by a skilled worker who is familiar with plant genetic methods by means of computer evaluations of other, known genes of the plant to be transformed.

[0150] Amino acid sequences which are to be understood as advantageous for the method according to the invention are those comprising an amino acid sequence shown in sequences SEQ ID NO: 2, SEQ ID NO: 4, SEQ ID NO: 6, SEQ ID NO: 8, SEQ ID NO: 10, SEQ ID NO: 12, SEQ ID NO: 14, SEQ ID NO: 16, SEQ ID NO: 18, SEQ ID NO: 27, SEQ ID NO: 29, SEQ ID NO: 31, SEQ ID NO: 33, SEQ ID NO: 35, SEQ ID NO: 37, SEQ ID NO: 39, SEQ ID NO: 41, SEQ ID NO: 45, SEQ ID NO: 47, SEQ ID NO: 49, SEQ ID NO: 51, SEQ ID NO: 53, SEQ ID NO: 55, SEQ ID NO: 57, SEQ ID NO: 59, SEQ ID NO: 61, SEQ ID NO: 63, SEQ ID NO: 65, SEQ ID NO: 67, SEQ ID NO: 69, SEQ ID NO: 71, SEQ ID NO: 73, SEQ ID NO: 75, SEQ ID NO: 77, SEQ ID NO: 79, SEQ ID NO: 81, SEQ ID NO: 83, SEQ ID NO: 85, SEQ ID NO: 87, SEQ ID NO: 89, SEQ ID NO: 91, SEQ ID NO: 93, SEQ ID NO: 95, SEQ ID NO: 97, SEQ ID NO: 99, SEQ ID NO: 101, SEQ ID NO: 103, SEQ ID NO: 105, SEQ ID NO: 107 or SEQ ID NO: 109 or a sequence which can be obtained from these by substitution, inversion, insertion or deletion of one or more amino acid residues, the biological activity of the protein shown in SEQ ID NO: 2, SEQ ID NO: 4, SEQ ID NO: 6, SEQ ID NO: 8, SEQ ID NO: 10, SEQ ID NO: 12, SEQ ID NO: 14, SEQ ID NO: 16, SEQ ID NO: 18, SEQ ID NO: 27, SEQ ID NO: 29, SEQ ID NO: 31, SEQ ID NO: 33, SEQ ID NO: 35, SEQ ID NO: 37, SEQ ID NO: 39, SEQ ID NO: 41, SEQ ID NO: 45, SEQ ID NO: 47, SEQ ID NO: 49, SEQ ID NO: 51, SEQ ID NO: 53, SEQ ID NO: 55, SEQ ID NO: 57, SEQ ID NO: 59, SEQ ID NO: 61, SEQ ID NO: 63, SEQ ID NO: 65, SEQ ID NO: 67, SEQ ID NO: 69, SEQ ID NO: 71, SEQ ID NO: 73, SEQ ID NO: 75, SEQ ID NO: 77, SEQ ID NO: 79, SEQ ID NO: 81, SEQ ID NO: 83, SEQ ID NO: 85, SEQ ID NO: 87, SEQ ID NO: 89, SEQ ID NO: 91, SEQ ID NO: 93, SEQ ID NO: 95, SEQ ID NO: 97, SEQ ID NO: 99, SEQ ID NO: 101, SEQ ID NO: 103, SEQ ID NO: 105, SEQ ID NO: 107 oder SEQ ID NO: 109 being retained or not being reduced substantially. The term not substantially reduced refers to all those proteins which retain at least 10%, preferably 20%, especially preferably 30%, 50%, 70%, 90% or more of the biological activity of the original protein. In this context, particular amino acids can, for example, be replaced by those with similar physicochemical properties (spatial arrangement, basicity, hydrophobicity and the like). For example, arginine residues are exchanged for lysin residues, valin residues for isoleucin residues or aspartate residues for glutamate residues. However, a sequence of one or more amino acids may also be swapped, one or more amino acids may be added or removed, or several of these measures can be combined with each other.

[0151] Derivatives are also to be understood as meaning functional equivalents which encompass in particular also natural or artificial mutations of the nucleic acid sequences SEQ ID NO: 1, SEQ ID NO: 3, SEQ ID NO: 5, SEQ ID NO: 7, SEQ ID NO: 9, SEQ ID NO: 11, SEQ ID NO: 13, SEQ ID NO: 15, SEQ ID NO: 17, SEQ ID NO: 26, SEQ ID NO: 28, SEQ ID NO: 30, SEQ ID NO: 32, SEQ ID NO: 34, SEQ ID NO: 36, SEQ ID NO: 38, SEQ ID NO: 40, SEQ ID NO: 44, SEQ ID NO: 46, SEQ ID NO: 48, SEQ ID NO: 50, SEQ ID NO: 52, SEQ ID NO: 54, SEQ ID NO: 56, SEQ ID NO: 58, SEQ ID NO: 60, SEQ ID NO: 62, SEQ ID NO: 64, SEQ ID NO: 66, SEQ ID NO: 68, SEQ ID NO: 70, SEQ ID NO: 72, SEQ ID NO: 74, SEQ ID NO: 76, SEQ ID NO: 78, SEQ ID NO: 80, SEQ ID NO: 82, SEQ ID NO: 84, SEQ ID NO: 86, SEQ ID NO: 88, SEQ ID NO: 90, SEQ ID NO: 92, SEQ ID NO: 94, SEQ ID NO: 96, SEQ ID NO: 98, SEQ ID NO: 100, SEQ ID NO: 102, SEQ ID NO: 106 or SEQ ID NO: 108 used herein, which retain the desired function, that is to say that their biological activity is not substantially reduced. Mutations encompass substitutions, additions, deletions, exchanges or insertions of one or more nucleotide residues. Thus, the present invention encompasses, for example, also those nucleotide sequences which are obtained by modifying the abovementioned nucleotide sequences. The aim of such a modification can be, for example, the further delimitation of the coding sequence comprised therein or else, for example, the insertion of further cleavage sites for restriction enzymes.

[0152] Functional equivalents are also those variants whose function, compared with the original gene or gene fragment, is weakened (=not substantially reduced) or increased (=enzyme activity greater than the activity of the original enzyme, that is to say the activity is higher than 100%, preferably higher than 150%, especially preferably higher than 180%).

[0153] In this context, the nucleic acid sequence can advantageously be, for example, a DNA or cDNA sequence. Coding sequences which are suitable for insertion into a nucleic acid construct according to the invention (=expression cassette or nucleic acid fragment) are, for example, those which encode a protein with the above-described sequences and which impart, to the host, the ability to overproduce the protein and thus its biological function. These sequences can be of homologous or heterologous origin.

[0154] The invention therefore furthermore relates to a nucleic acid construct containing a nucleic acid sequence selected, for example, from the group consisting of:
[0155] a) a nucleic acid sequence with the sequence shown in SEQ ID NO: 1, SEQ ID NO: 3, SEQ ID NO: 5, SEQ ID NO: 7, SEQ ID NO: 9, SEQ ID NO: 11, SEQ ID NO: 13, SEQ ID NO: 15, SEQ ID NO: 17, SEQ ID NO: 26, SEQ ID NO: 28, SEQ ID NO: 30, SEQ ID NO: 32, SEQ ID NO: 34, SEQ ID NO: 36, SEQ ID NO: 38 or SEQ ID NO: 40, SEQ ID NO: 44, SEQ ID NO: 46, SEQ ID NO: 48, SEQ ID NO: 50, SEQ ID NO: 52, SEQ ID NO: 54, SEQ ID NO: 56, SEQ ID NO: 58, SEQ ID NO: 60, SEQ ID NO: 62, SEQ ID NO: 64, SEQ ID NO: 66, SEQ ID NO: 68, SEQ ID NO: 70, SEQ ID NO: 72, SEQ ID NO: 74, SEQ ID NO: 76, SEQ ID NO: 78, SEQ ID NO: 80, SEQ ID NO: 82, SEQ ID NO: 84, SEQ ID NO: 86, SEQ ID NO: 88, SEQ ID NO: 90, SEQ ID NO: 92, SEQ ID NO: 94, SEQ ID NO: 96, SEQ ID NO: 98, SEQ ID NO: 100, SEQ ID NO: 102, SEQ ID NO: 106 or SEQ ID NO: 108; or
[0156] b) a nucleic acid sequence which can be derived from the amino acid sequences shown in SEQ ID NO: 2, SEQ ID NO: 4, SEQ ID NO: 6, SEQ ID NO: 8, SEQ ID NO: 10, SEQ ID NO: 12, SEQ ID NO: 14, SEQ ID NO: 16, SEQ ID NO: 18, SEQ ID NO: 27, SEQ ID NO: 29, SEQ ID NO: 31, SEQ ID NO: 33, SEQ ID NO: 35, SEQ ID NO: 37, SEQ ID NO: 39, SEQ ID NO: 41, SEQ ID NO: 45, SEQ ID NO: 47, SEQ ID NO: 49, SEQ ID NO: 51, SEQ ID NO: 53, SEQ ID NO: 55, SEQ ID NO: 57, SEQ ID NO: 59, SEQ ID NO: 61, SEQ ID NO: 63, SEQ ID NO: 65, SEQ ID NO: 67, SEQ ID NO: 69, SEQ ID NO: 71, SEQ ID NO: 73, SEQ ID NO: 75, SEQ ID NO: 77, SEQ ID NO: 79, SEQ ID NO: 81, SEQ ID NO: 83, SEQ ID NO: 85, SEQ ID NO: 87, SEQ ID NO: 89, SEQ ID NO: 91, SEQ ID NO: 93, SEQ ID NO: 95, SEQ ID NO: 97, SEQ ID NO: 99, SEQ ID NO: 101, SEQ ID NO: 103, SEQ ID NO: 105, SEQ ID NO: 107 oder SEQ ID NO: 109 by backtranslation owing to the degeneracy of the genetic code;
[0157] c) a nucleic acid sequence which is a derivative or a fragment of the nucleic acid sequences shown in SEQ ID NO: 1, SEQ ID NO: 3, SEQ ID NO: 5, SEQ ID NO: 7 SEQ ID NO: 9, SEQ ID NO: 11, SEQ ID NO: 13, SEQ ID NO: 15, SEQ ID NO: 17, SEQ ID NO: 26, SEQ ID NO: 28, SEQ ID NO: 30, SEQ ID NO: 32, SEQ ID NO: 34, SEQ ID NO: 36, SEQ ID NO: 38, SEQ ID NO: 40, SEQ ID NO: 44, SEQ ID NO: 46, SEQ ID NO: 48, SEQ ID NO: 50, SEQ ID NO: 52, SEQ ID NO: 54, SEQ ID NO: 56, SEQ ID NO: 58, SEQ ID NO: 60, SEQ ID NO: 62, SEQ ID NO: 64, SEQ ID NO: 66, SEQ ID NO: 68, SEQ ID NO: 70, SEQ ID NO: 72, SEQ ID NO: 74, SEQ ID NO: 76, SEQ ID NO: 78, SEQ ID NO: 80, SEQ ID NO: 82, SEQ ID NO: 84, SEQ ID NO: 86, SEQ ID NO: 88, SEQ ID NO: 90, SEQ ID NO: 92, SEQ ID NO: 94, SEQ ID NO: 96, SEQ ID NO: 98, SEQ ID NO: 100, SEQ ID NO: 102, SEQ ID NO: 106 or SEQ ID NO: 108 and which has at least 60% homology at the nucleic acid level;
[0158] d) a nucleic acid sequence which encodes derivatives or fragments of the polypeptides with the amino acid sequences shown in SEQ ID NO: 2, SEQ ID NO: 4, SEQ ID NO: 6, SEQ ID NO: 8, SEQ ID NO: 10, SEQ ID NO: 12, SEQ ID NO: 14, SEQ ID NO: 16, SEQ ID NO: 18, SEQ ID NO: 27, SEQ ID NO: 29, SEQ ID NO: 31, SEQ ID NO: 33, SEQ ID NO: 35, SEQ ID NO: 37, SEQ ID NO: 39, SEQ ID NO: 41, SEQ ID NO: 45, SEQ ID NO: 47, SEQ ID NO: 49, SEQ ID NO: 51, SEQ ID NO: 53, SEQ ID NO: 55, SEQ ID NO: 57, SEQ ID NO: 59, SEQ ID NO: 61, SEQ ID NO: 63, SEQ ID NO: 65, SEQ ID NO: 67, SEQ ID NO: 69, SEQ ID NO: 71, SEQ ID NO: 73, SEQ ID NO: 75, SEQ ID NO: 77, SEQ ID NO: 79, SEQ ID NO: 81, SEQ ID NO: 83, SEQ ID NO: 85, SEQ ID NO: 87, SEQ ID NO: 89, SEQ ID NO: 91, SEQ ID NO: 93, SEQ ID NO: 95, SEQ ID NO: 97, SEQ ID NO: 99, SEQ ID NO: 101, SEQ ID NO: 103, SEQ ID NO: 105, SEQ ID NO: 107 or SEQ ID NO: 109 and which have at least 50% homology at the amino acid level;
[0159] e) a nucleic acid sequence which encodes a fragment or an epitope of a polypeptide which binds specifically to an antibody, the antibody specifically binding to a polypeptide which is encoded by the sequence shown in SEQ ID NO: 1, SEQ ID NO: 3, SEQ ID NO: 5, SEQ ID NO: 7, SEQ ID NO: 9, SEQ ID NO: 11, SEQ ID NO: 13, SEQ ID NO: 15, SEQ ID NO: 17, SEQ ID NO: 26, SEQ ID NO: 28, SEQ ID NO: 30, SEQ ID NO: 32, SEQ ID NO: 34, SEQ ID NO: 36, SEQ ID NO: 38, SEQ ID NO: 40, SEQ ID NO: 44, SEQ ID NO: 46, SEQ ID NO: 48, SEQ ID NO: 50, SEQ ID NO: 52, SEQ ID NO: 54, SEQ ID NO: 56, SEQ ID NO: 58, SEQ ID NO: 60, SEQ ID NO: 62, SEQ ID NO: 64, SEQ ID NO: 66, SEQ ID NO: 68, SEQ ID NO: 70, SEQ ID NO: 72, SEQ ID NO: 74, SEQ ID NO: 76, SEQ ID NO: 78, SEQ ID NO: 80, SEQ ID NO: 82, SEQ ID NO: 84, SEQ ID NO: 86, SEQ ID NO: 88, SEQ ID NO: 90, SEQ ID NO: 92, SEQ ID NO: 94, SEQ ID NO: 96, SEQ ID NO: 98, SEQ ID NO: 100, SEQ ID NO: 102, SEQ ID NO: 106 oder SEQ ID NO: 108;
[0160] f) a nucleic acid sequence which encodes a fragment of a nucleic acid shown in a) and which has an m6A-methyltransferase activity, a DNA-binding activity or DNA repair activity, for example as in the case of RAD 54, a thioredoxin activity, a VAV2 activity, a fructokinase activity, a zinc finger protein activity, an LYTB activity, a crepopin activity, a leucine protein activity, a DNAJ activity, a CRS1 activity, an alanyl-tRNA-synthetase activity, an OEP86 activity, an FMRF amide propeptide isolog activity, a 26S proteosome subunit S5B activity or a geranylgeranyl-pyrophosphate synthase activity, cecropin family signature, ftsH chloroplast protease activity, AIM1 activity, UDP-glucuronyl transferase activity, FPF1 activity, SHI-like zinc finger protein activity, Crp1 activity, CRS1 activity, translation releasing factor RF-1 activity, farnesyl transferase subunit A activity, ATP-dependent copper transporter RAN1 activity, syntaxin or syntaxin-like-protein activity, inositol-polyphosphate-5′-phosphatase activity, UDP—N-acetylmuramoylalanyl-D-glutamate-2,6-diaminopimelate ligase activity (murE), β-glucosidase activity, hydroxymethylglutaryl-CoA reductase activity, GDSL-motif-lipase/hydroxylase-like-protein activity, cellulose-synthase-like-protein activity, tRNA-glutamine synthetase activity, exonuclease-like-protein activity, sec-independent translocase protein TATC activity or selenium-binding-protein-like-protein activity; and/or
[0161] g) a nucleic acid sequence which encodes derivatives of the polypeptides with the amino acid sequences shown in SEQ ID NO: 2, SEQ ID NO: 4, SEQ ID NO: 6, SEQ ID NO: 8, SEQ ID NO: 10, SEQ ID NO: 12, SEQ ID NO: 14, SEQ ID NO: 16, SEQ ID NO: 18, SEQ ID NO: 27, SEQ ID NO: 29, SEQ ID NO: 31, SEQ ID NO: 33, SEQ ID NO: 35, SEQ ID NO: 37, SEQ ID NO: 39, SEQ ID NO: 41, SEQ ID NO: 45, SEQ ID NO: 47, SEQ ID NO: 49, SEQ ID NO: 51, SEQ ID NO: 53, SEQ ID NO: 55, SEQ ID NO: 57, SEQ ID NO: 59, SEQ ID NO: 61, SEQ ID NO: 63, SEQ ID NO: 65, SEQ ID NO: 67, SEQ ID NO: 69, SEQ ID NO: 71, SEQ ID NO: 73, SEQ ID NO: 75, SEQ ID NO: 77, SEQ ID NO: 79, SEQ ID NO: 81, SEQ ID NO: 83, SEQ ID NO: 85, SEQ ID NO: 87, SEQ ID NO: 89, SEQ ID NO: 91, SEQ ID NO: 93, SEQ ID NO: 95, SEQ ID NO: 97, SEQ ID NO: 99, SEQ ID NO: 101, SEQ ID NO: 103, SEQ ID NO: 105, SEQ ID NO: 107 or SEQ ID NO: 109 and which has at least 20% homology at the amino acid level and has an equivalent biological activity;
[0162] the nucleic acid sequence being linked to one or more regulatory signals. The abovementioned terms have the abovementioned meanings.

[0163] The nucleic acid construct according to the invention is to be understood as meaning the sequences stated in SEQ ID NO: 1, SEQ ID NO: 3, SEQ ID NO: 5, SEQ ID NO: 7, SEQ ID NO: 9, SEQ ID NO: 11, SEQ ID NO: 13, SEQ ID NO: 15, SEQ ID NO: 17, SEQ ID NO: 26, SEQ ID NO: 28, SEQ ID NO: 30, SEQ ID NO: 32, SEQ ID NO: 34, SEQ ID NO: 36, SEQ ID NO: 38, SEQ ID NO: 40, SEQ ID NO: 44, SEQ ID NO: 46, SEQ ID NO: 48, SEQ ID NO: 50, SEQ ID NO: 52, SEQ ID NO: 54, SEQ ID NO: 56, SEQ ID NO: 58, SEQ ID NO: 60, SEQ ID NO: 62, SEQ ID NO: 64, SEQ ID NO: 66, SEQ ID NO: 68, SEQ ID NO: 70, SEQ ID NO: 72, SEQ ID NO: 74, SEQ ID NO: 76, SEQ ID NO: 78, SEQ ID NO: 80, SEQ ID NO: 82, SEQ ID NO: 84, SEQ ID NO: 86, SEQ ID NO: 88, SEQ ID NO: 90, SEQ ID NO: 92, SEQ ID NO: 94, SEQ ID NO: 96, SEQ ID NO: 98, SEQ ID NO: 100, SEQ ID NO: 102, SEQ ID NO: 106 or SEQ ID NO: 108 as the result of the genetic code and/or their functional or nonfunctional derivatives which were functionally linked to one or more regulatory signals advantageously for regulating, in particular for increasing gene expression and which govern the expression of the coding sequence in the host cell. These regulatory sequences are intended to make possible the targeted expression of the genes or proteins. Depending on the host organism, this may mean, for example, that the gene is expressed and/or overexpressed only after induction, or that it is expressed and/or overexpressed immediately. For example, these regulatory sequences take the form of sequences to which inductors or repressors bind, thus regulating the expression of the nucleic acid. In addition to these novel regulatory sequences, or instead of these sequences, the natural regulation of these sequences may still be present before the actual structural genes and, if appropriate, have been modified genetically so that the natural regulation has been switched off and the expression of the genes increased. The nucleic acid construct according to the invention may also advantageously only be composed of the natural recombinantly modified regulatory region at the 5′ and/or 3′ end. However, the gene construct may also be constructed in a simpler fashion, that is to say no additional regulatory signals were inserted before the nucleic acid sequence or its derivatives and the natural promoter with its regulation was not removed. Instead, the natural regulatory sequence was mutated so that regulation no longer takes place and/or gene expression is increased. To increase the activity, these modified promoters may also be introduced before the natural gene by themselves in the form of part-sequences (=promoter with portions of the nucleic acid sequences according to the invention). Moreover, the gene construct can advantageously also comprise one or more of what are known as “enhancer sequences” operably linked to the promoter, and these make possible an increased expression of the nucleic acid sequence. Additional advantageous sequences such as further regulatory elements or terminators may also be inserted at the 3′ end of the DNA sequences. The nucleic acid sequences used in the method according to the invention may be present in the expression cassette (=gene construct) in one or more copies.

[0164] As described above, the regulatory sequences or factors can preferably exert a positive effect on, and thus increase, the gene expression of the genes which have been introduced. Thus, an enhancement of the regulatory elements may advantageously take place at the transcription level, by using strong transcription signals such as promoters and/or enhancers. In addition, however, increased translation is also possible, for example by improving the stability of the mRNA. In another advantageous embodiment, however, expression may also be reduced or blocked in a targeted fashion.

[0165] Promoters which are suitable as promoters in the expression cassette are, in principle, all those which are capable of governing the expression of foreign genes in organisms, advantageously in plants or fungi. In particular plant promoters or promoters originating from a plant virus are used by preference. Advantageous regulatory sequences for the method according to the invention are present, for example, in promoters such as the cos, tac, trp, tet, trp-tet, lpp, lac, lpp-lac, lacI^{q}, T7, T5, T3, gal, trc, ara, SP6, λ-P_{R} or in the λ-P_{L} promoter, these promoters being used advantageously in Gram-negative bacteria. Further advantageous regulatory sequences are present, for example, in the Gram-positive promoters amy and SPO2, in the yeast or fungal promoters ADC1, MFα, AC, P-60, CYC1, GAPDH, TEF, rp28, ADH or in the plant promoters such as in the CaMV/35S [Franck et al., Cell 21(1980) 285-294], SSU, OCS, lib4, STLS1, B33, nos (=nopaline synthase promoter) or in the ubiquitin promoter. The expression cassette may also comprise a chemically inducible promoter by which the expression of the nucleic acid sequences in the nucleic acid construct according to the invention can be controlled in the organisms, advantageously in the plants, at a particular point in time. Such advantageous plant promoters are, for example, the PRP1 promoter [Ward et al., Plant. Mol. Biol. 22(1993), 361-366), a benzenesulfonamide-inducible promoter (EP 388186), a tetracyclin-inducible promoter (Gatz et al., (1992) Plant J. 2,397-404), a salicylic-acid-inducible promoter (WO 95/19443), an abscisic-acid-inducible promoter (EP335528) or an ethanol- or cyclohexanone-inducible promoter (WO93/21334). Further plant promoters are, for example, the potato cytosolic FBPase, the potato ST-LSI promoter (Stockhaus et al., EMBO J. 8 (1989) 2445-245), the Glycine max phosphoribosyl-pyrophosphate amidotransferase promoter (see also Genbank Accession Number U87999) or a node-specific promoter such as in EP 249676 can advantageously be used.

[0166] As described above, further genes to be introduced into the organisms may also be present in the expression cassette (=gene construct, nucleic acid construct). These genes can be subject to separate regulation or subject to the same regulatory region as the nucleic acid sequences used in the method. For example, these genes take the form of biosynthesis genes of the metabolism, such as of fatty acid, amino acid or vitamin biosynthesis, or regulatory genes, to mention just a few.

[0167] In principle, all natural promoters together with their regulatory sequences, such as those mentioned above, can be used for the expression cassette according to the invention and for the method according to the invention, as described hereinbelow. Moreover, synthetic promoters may also be used advantageously.

[0168] When preparing an expression cassette, various DNA fragments can be manipulated in order to obtain a nucleotide sequence which expediently reads in the correct direction and is equipped with a correct reading frame. To connect the DNA fragments (=nucleic acids according to the invention) to each other, adapters or linkers may be attached to the fragments.

[0169] The promoter and terminator regions can expediently be provided, in the direction of transcription, with a linker or polylinker containing one or more restriction sites for the insertion of this sequence. As a rule, the linker has 1 to 10, in most cases 1 to 8, preferably 2 to 6, restriction sites. In general, the linker within the regulatory regions has a size of less than 100 bp, frequently less than 60 bp, but at least 5 bp. The promoter can be both native, or homologous, and foreign, or heterologous, with regard to the host organism, for example the host plant. In the 5′-3′ direction of transcription, the expression cassette comprises the promoter, a DNA sequence which encodes the proteins used in the method according to the invention, and a region for transcriptional termination. Various termination regions can advantageously be exchanged for each other.

[0170] Furthermore, manipulations which provide suitable restriction cleavage sites or which remove surplus DNA or restriction cleavage sites may be employed. Where insertions, deletions or substitutions such as, for example, transitions and transversions are suitable, in vitro mutagenesis, primer repair, restriction or ligation may be used. In the case of suitable manipulations such as, for example, restriction, chewing back or filling in overhangs for blunt ends, complementary ends of the fragments may be provided for ligation.

[0171] Attaching the specific ER retention signal SEKDEL (Schouten, A. et al., Plant Mol. Biol. 30 (1996), 781-792) may, inter alia, be of importance for an advantageous high level of expression; the average expression level is tripled to quadrupled thereby. Other retention signals which occur naturally in vegetable and animal proteins located in the ER may also be employed for synthesizing the cassette.

[0172] Preferred polyadenylation signals are plant polyadenylation signals, preferably those which essentially correspond to T-DNA polyadenylation signals from Agrobacterium tumefaciens, in particular of gene 3 of the T-DNA (octopine synthase) of the Ti plasmid pTiACH5 (Gielen et al., EMBO J. 3 (1984), 835 et seq.) or suitable functional equivalents.

[0173] An expression cassette is generated by fusing a suitable promoter to a suitable nucleic acid sequence and a polyadenylation signal, using customary recombination and cloning techniques as are described, for example, in T. Maniatis, E. F. Fritsch and J. Sambrook, Molecular Cloning: A Laboratory Manual, Cold Spring Harbor Laboratory, Cold Spring Harbor, N.Y. (1989) and in T. J. Silhavy, M. L. Berman and L. W. Enquist, Experiments with Gene Fusions, Cold Spring Harbor Laboratory, Cold Spring Harbor, N.Y. (1984) and in Ausubel, F. M. et al., Current Protocols in Molecular Biology, Greene Publishing Assoc. and Wiley-Interscience (1987).

[0174] When preparing an expression cassette, various DNA fragments may be manipulated in order to obtain a nucleotide sequence which expediently reads in the correct direction and which is equipped with a correct reading frame. To link the DNA fragments to each other, adapters or linkers may be attached to the fragments.

[0175] The nucleic acid sequences used in the method according to the invention encompass all sequence characteristics which are necessary to achieve a localization which is correct for the site of the biological action or activity. Thus, further targeting sequences are not necessary per se. However, such a localization may be desirable and advantageous and may therefore be modified or enhanced artificially so that such fusion constructs are also a preferred advantageous embodiment of the invention.

[0176] Advantageous for this purpose are, for example, sequences which ensure targeting into the plastids. Under certain circumstances, targeting into other compartments (reviewed in: Kermode, Crit. Rev. Plant Sci. 15, 4 (1996), 285-423), for example into the vacuole, into the mitochondrion, into the endoplasmic reticulum (ER), peroxisomes, lipid bodies or else, owing to the absence of suitable operative sequences, remaining in the compartment of formation, the cytosol, may also be desirable.

[0177] Advantageously, the nucleic acid sequences according to the invention, together with at least one reporter gene, are cloned into an expression cassette which is introduced into the organism via a vector or directly into the genome. This reporter gene should allow easy detectability via a growth, fluorescence, chemoluminescence, bioluminescence or resistance assay or via a photometric measurement. Examples of reporter genes which may be mentioned are genes for resistance to antibiotics or herbicides, hydrolase genes, fluorescent protein genes, bioluminescence genes, sugar or nucleotide metabolism genes, or biosynthesis genes such as the Ura3 gene, the Ilv2 gene, the luciferase gene, the β-galactosidase gene, the gfp gene, the β-deoxyglucose-6-phosphate phosphatase gene, the β-glucuronidase gene, the β-lactamase gene, the neomycin phosphotransferase gene, the hygromycin phosphotransferase gene, or the gene for BASTA (=glufosinate) resistance. These genes allow the transcription activity, and thus gene expression, to be measured and quantified readily. This makes possible the identification of sites in the genome which show different productivity.

[0178] In a preferred embodiment, an expression cassette comprises upstream, i.e. at the 5′ end of the coding sequence, a promoter and downstream, i.e. at the 3′ end, a polyadenylation signal and, if appropriate, further regulatory elements which are linked operably to the interposed coding sequence for the proteins used in the method according to the invention. Operable linkage is to be understood as meaning the sequential arrangement of the promoter, coding sequence, terminator and, if appropriate, further regulatory elements in such a way that each of the regulatory elements can fulfil its intended function upon expression of the coding sequence. The sequences which are preferred for operable linkage are targeting sequences for ensuring subcellular localization in the plastids. However, targeting sequences for ensuring subcellular localization in the mitochondrion, in the endoplasmic reticulum (=ER), in the nucleus, in elaioplasts or other compartments may be used, if required, or else translation enhancers such as the tobacco mosaic virus 5′ leader sequence (Gallie et al., Nucl. Acids Res. 15 (1987), 8693-8711).

[0179] An expression cassette may, for example, comprise a constitutive promoter, for example the 35S promoter, the gene to be expressed, and the ER retention signal. The amino acid sequence KDEL (lysine, aspartic acid, glutamic acid, leucin) is preferably used as ER retention signal.

[0180] For expression in a prokaryotic or eukaryotic host organism, for example a microorganism such as a fungus, or a plant, the expression cassette is advantageously inserted into a vector such as, for example, a plasmid, a phage or other DNA which makes possible optimal expression of the genes in the host organism. Suitable plasmids are, for example, in E. coli pLG338, pACYC184, pBR series, such as, for example, pBR322, pUC series, such as pUC18 or pUC19, M113mp series, pKC30, pRep4, pHS1, pHS2, pPLc236, pMBL24, pLG200, pUR290, pIN—III¹¹³—B1, λgt11 or pBdCI, in Streptomyces pIJ101, pIJ364, pIJ702 or pIJ361, in Bacillus pUB110, pC194 or pBD214, in Corynebacterium pSA77 or pAJ667, in fungi pALS1, pIL2 or pBB116, further advantageous fungal vectors are described by Romanos, M. A. et al., [(1992) “Foreign gene expression in yeast: a review”, Yeast 8: 423-488] and by van den Hondel, C. A. M. J. J. et al. [(1991) “Heterologous gene expression in filamentous fungi] and in More Gene Manipulations in Fungi [J. W. Bennet & L. L. Lasure, eds., p. 396-428: Academic Press: San Diego] and in “Gene transfer systems and vector development for filamentous fungi” [van den Hondel, C. A. M. J. J. & Punt, P. J. (1991) in: Applied Molecular Genetics of Fungi, Peberdy, J. F. et al., eds., p. 1-28, Cambridge University Press: Cambridge]. Advantageous yeast promoters are, for example, 2 μM, pAG-1, YEp6, YEp13 or pEMBLYe23. Examples of algal or plant promoters are pLGV23, pGHlac⁺, pBIN19, pAK2004, PVKH or pDH51 (see Schmidt, R. and Willmitzer, L., 1988). The abovementioned vectors or derivatives of the abovementioned vectors constitute a small selection of the plasmids which are possible. Further plasmids are well known to the skilled worker and can be found, for example, in the book Cloning Vectors (Eds. Pouwels P. H. et al. Elsevier, Amsterdam-New York-Oxford, 1985 , ISBN 0 444 904018). Suitable plant vectors are described, inter alia, in “Methods in Plant Molecular Biology and Biotechnology” (CRC Press), chapter 6/7, pp. 71-119. Advantageous vectors are what are-known as shuttle vectors or binary vectors, which replicate in E. coli and Agrobacterium.

[0181] In addition to plasmids, vectors are also to be understood as meaning all of the other vectors known to the skilled worker, such as, for example, phages, viruses such as SV40, CMV, baculovirus, adenovirus, transposons, IS elements, phasmids, phagemids, cosmids, linear or circular DNA. These vectors can be replicated autonomously in the host organism or can be replicated chromosomally; chromosomal replication is preferred. Functional and nonfunctional vectors are encompassed.

[0182] In a further embodiment of the vector, the nucleic acid construct according to the invention may also advantageously be introduced into the organisms in the form of a linear DNA and integrated into the genome of the host organism via heterologous or homologous recombination. This linear DNA may be composed of a linearized plasmid or only of the nucleic acid construct as vector, or the nucleic acid sequences used.

[0183] In a further advantageous embodiment, the nucleic acid sequences used in the method according to the invention may also be introduced into an organism by themselves.

[0184] If, in addition to the nucleic acid sequences, further genes are to be introduced into the organism, all may be introduced into the organism together with a reporter gene in a single vector, or each individual gene with or without a reporter gene in a separate vector, it being possible to introduce the various vectors simultaneously or in succession.

[0185] The vector advantageously comprises at least one copy of the nucleic acid sequences used and/or of the nucleic acid construct according to the invention.

[0186] For example, the nucleic acid construct can be incorporated into the tobacco transformation vector pBinAR and be under the control of the 35S promoter or the USP promoter.

[0187] As an alternative, a recombinant vector (=expression vector) may also be transcribed and translated in vitro, for example by using the T7 promoter and T7 RNA polymerase.

[0188] Further advantageous vectors comprise resistances which can be used in plants or plant crops, such as the resistance to phosphinothricin (=bar resistance), the resistance to methionine sulfoximine, the resistance to sulfonylurea (=i1v resistance, S. cerevisiae i1v2), the resistance to phenoxyphenoxy herbicide (=ACCase resistance), the resistance to glyphosate or Clearfield (AHAS resistance), or the genes which encode these resistances. These resistances can be exploited in intact plants for selecting transgenic plants. Only plants to which these resistances have been imparted via a transformation process are capable of growing in the presence of the selecting substance. Following transformation in planta—for example infiltration of the seed precursor cells—kanamycin or hygromycin are other examples of selecting agents in cell cultures on agar plates. Moreover, advantageous vectors may comprise sequences for integration into the genome of the organisms, preferably the plants. Examples of such sequences are what are known as T-DNA borders. In addition, advantageous vectors may also comprise promoters and terminators such as, for example, those described above. What are known as poly-A sequences may also be present in the vector. Advantageous vectors can be found, for example, in FIGS. 1, 2 and 3. SEQ ID NO: 25 indicates the advantageous sequence of vector pMTX 1a300. This vector contains a kanamycin resistance (nucleotide 4922-5713), a phosphinothricin resistance (nucleotide 6722-7288), the LacZalpha fragment (nucleotide 7630-7864), a portion of pVS1sta (nucleotide 945-1945), a portion of pBR322bom (nucleotide 3948-4208), a T border sequence (left, nucleotide 6138-6163), a T border sequence (right, nucleotide 7924-7949), a poly-A portion (nucleotide 7292-7503), the mas2′1′ promoter (nucleotide 6241-6718) and two origins of replication pVS1rep (nucleotide 6241-6718) and pBR322ori (nucleotide 43-4628).

[0189] Expression vectors used in prokaryotes frequently exploit inducible systems with and without fusion proteins or fusion oligopeptides, it being possible for these fusions to be effected at the N terminal or the C terminal or other utilizable domains of a protein. In general, the purpose of such fusion vectors is: i.) to increase the expression rate of the RNA, ii.) to increase the achievable protein synthesis rate, iii.) to increase the solubility of the protein, or iv.) to simplify purification by a binding sequence which can be exploited in affinity chromatography. Also, proteolytic cleavage sites are frequently introduced via fusion proteins, which makes possible the elimination of a portion of the fusion protein upon purification. Such recognition sequences which proteases recognize are, for example, factor Xa, thrombin and enterokinase.

[0190] Typical advantageous fusion and expression vectors are pGEX [Pharmacia Biotech Inc; Smith, D. B. and Johnson, K. S. (1988) Gene 67:31-40], pMAL (New England Biolabs, Beverly, Mass.) and pRIT5 (Pharmacia, Piscataway, N.J.), which comprises glutathione S transferase (GST), maltose binding protein, or protein A.

[0191] Further examples for E. coli expression vectors are pTrc [Amann et al., (1988) Gene 69:301-315] and pET vectors [Studier et al., Gene Expression Technology: Methods in Enzymology 185, Academic Press, San Diego, Calif. (1990) 60-89; Stratagene, Amsterdam, Netherlands].

[0192] Further advantageous vectors for use in yeast are pYepSec1 (Baldari, et al., (1987) Embo J. 6:229-234), pMFa (Kurjan and Herskowitz, (1982) Cell 30:933-943), pJRY88 (Schultz et al., (1987) Gene 54:113-123), and pYES derivatives (Invitrogen Corporation, San Diego, Calif.). Vectors for use in filamentous fungi are described in: van den Hondel, C. A. M. J. J. & Punt, P. J. (1991) “Gene transfer systems and vector development for filamentous fungi, in: Applied Molecular Genetics of Fungi, J. F. Peberdy, et al., eds., p. 1-28, Cambridge University Press: Cambridge.

[0193] As an alternative, insect cell expression vectors may also be used advantageously, for example for expression in Sf 9 cells. Examples of these are the vectors of the pAc series (Smith et al. (1983) Mol. Cell Biol. 3:2156-2165) and of the pVL series (Lucklow and Summers (1989) Virology 170:31-39).

[0194] Moreover, plant cells or algal cells may advantageously be used for gene expression. Examples of plant expression vectors are found in Becker, D., et al. (1992) “New plant binary vectors with selectable markers located proximal to the left border”, Plant Mol. Biol. 20: 1195-1197 or in Bevan, M. W. (1984) “Binary Agrobacterium vectors for plant transformation”, Nucl. Acid. Res. 12: 8711-8721.

[0195] Furthermore, the nucleic acid sequences according to the invention can be expressed in mammalian cells. Examples of suitable expression vectors are pCDM8 and pMT2PC, which are mentioned in: Seed, B. (1987) Nature 329:840 or Kaufman et al. (1987) EMBO J. 6:187-195). Promoters preferably to be used are of viral origin, such as, for example, promoters of polyoma virus, adenovirus 2, cytomegalovirus or simian virus 40. Further prokaryotic and eukaryotic expression systems are mentioned in chapters 16 and 17 in Sambrook et al., Molecular Cloning: A Laboratory Manual. 2nd, ed., Cold Spring Harbor Laboratory, Cold Spring Harbor Laboratory Press, Cold Spring Harbor, N.Y., 1989. Further advantageous vectors are described in Hellens et al. (Trends in plant science, 5, 2000).

[0196] In principle, the nucleic acids according to the invention, the expression cassette or the vector can be introduced into organisms, for example into plants, by all methods with which the skilled worker is familiar.

[0197] For microorganisms, the skilled worker will find suitable methods in the textbooks by Sambrook, J. et al. (1989) Molecular cloning: A laboratory manual, Cold Spring Harbor Laboratory Press, by F. M. Ausubel et al. (1994) Current protocols in molecular biology, John Wiley and Sons, by D. M. Glover et al., DNA Cloning Vol.1, (1995), IRL Press (ISBN 019-963476-9), by Kaiser et al. (1994) Methods in Yeast Genetics, Cold Spring Habor Laboratory Press or Guthrie et al. Guide to Yeast Genetics and Molecular Biology, Methods in Enzymology, 1994, Academic Press.

[0198] The transfer of foreign genes into the genome of a plant is referred to as transformation. It exploits the above-described methods of transforming and regenerating plants from plant tissues or plant cells for transient or stable transformation. Suitable methods are protoplast transformation by polyethylene glycol-induced DNA uptake, the biolistic method with the gene gun—known as the particle bombardment method—, electroporation, incubation of dry embryos in DNA-containing solution, microinjection and Agrobacterium-mediated gene transfer. In the present invention, the gene transfer is advantageously effected using, for example, Agrobacterium tumefaciens strain GV 3101 pMP90. The abovementioned methods are described in, for example, B. Jenes et al., Techniques for Gene Transfer, in: Transgenic Plants, Vol. 1, Engineering and Utilization, edited by S. D. Kung and R. Wu, Academic Press (1993) 128-143 and in Potrykus Annu. Rev. Plant Physiol. Plant Molec. Biol. 42 (1991) 205-225. The construct to be expressed is preferably cloned into a vector which is suitable for transforming Agrobacterium tumefaciens, for example pBin19 (Bevan et al., Nucl. Acids Res. 12 (1984) 8711). Agrobacteria transformed with such a vector can then be used for transforming plants, in particular crop plants such as, for example, tobacco plants, in the known manner, for example by bathing scarified leaves or leaf sections in an agrobacterial solution and subsequently growing them in suitable media. The transformation of plants with Agrobacterium tumefaciens is described, for example, by Höfgen and Willmitzer in Nucl. Acid Res. (1988) 16, 9877 or is known, inter alia, from F. F. White, Vectors for Gene Transfer in Higher Plants; in Transgenic Plants, Vol. 1, Engineering and Utilization, edited by S. D. Kung and R. Wu, Academic Press, 1993, pp. 15-38.

[0199] An advantageous embodiment is described hereinbelow. If agrobacteria are used for the transformation, the nucleic acid or DNA to be introduced will be cloned into specific plasmids, either into an intermediary vector or into a binary vector. The intermediary vectors can be integrated into the Ti or Ri plasmid of the agrobacteria by homologous recombination, owing to sequences which are homologous to sequences in the T-DNA. The Ti or Ri plasmid additionally comprises the vir region, which is required for the transfer of the T-DNA. Intermediary vectors are not capable of replication in agrobacteria. The intermediary vector can be transferred to Agrobacterium tumefaciens by means of a helper plasmid (conjugation). Binary vectors are capable of replication both in E. coli and in agrobacteria. They comprise a selection marker gene and a linker or polylinker, which are framed by the right and left T-DNA border region. They can be transformed directly into the agrobacteria (Holsters et al. Mol. Gen. Genet. 163 (1978), 181-187). The agrobacterium which acts as the host cell should comprise a plasmid carrying a vir region. The vir region is required for the transfer of the T-DNA into the plant cell. Additional T-DNA may be present. The agrobacterium transformed in this way is used for transforming plant cells.

[0200] The use of T-DNA for transforming plant cells has been studied intensively and described amply in EPA-0 120 516; Hoekema, In: The Binary Plant Vector System Offsetdrukkerij Kanters B. V., Alblasserdam (1985), Chapter V; Fraley et al., Crit. Rev. Plant. Sci., 4: 1-46 and An et al. EMBO J. 4 (1985), 277-287.

[0201] To transfer the DNA into the plant cell, plant explants can expediently be cocultured with Agrobacterium tumefaciens or Agrobacterium rhizogenes. Then, intact plants can be regenerated from the infected plant material (for example leaf sections, stem segments, roots, but also protoplasts, or plant cells grown in suspension culture) in a suitable medium which may comprise antibiotics or biocides for selecting transformed cells. The plants obtained in this way can then be examined for the presence of the DNA introduced. Other possibilities of introducing foreign DNA using the biolistic method or by protoplast transformation are known (cf., for example, Willmitzer, L., 1993 Transgenic plants. In: Biotechnology, A Multi-Volume Comprehensive Treatise (H. J. Rehm, G. Reed, A. Pühler, P. Stadler, eds.), Vol. 2, 627-659, VCH Weinheim-New York-Basel-Cambridge).

[0202] The transformation of monocotyledonous plants by means of Agrobacterium-based vectors has also been described (Chan et al, Plant Mol. Biol. 22(1993), 491-506; Hiei et al, Plant J. 6 (1994) 271-282; Deng et al.; Science in China 33 (1990), 28-34; Wilmink et al., Plant Cell Reports 11,(1992) 76-80; May et al.; Biotechnology 13 (1995) 486-492; Conner and Domisse; Int. J. Plant Sci. 153 (1992) 550-555; Ritchie et al.; Transgenic Res. (1993) 252-265). Alternative systems for transforming monocotyledonous plants are the transformation by means of the biolistic approach (Wan and Lemaux; Plant Physiol. 104 (1994), 37-48; Vasil et al.; Biotechnology 11 (1992), 667-674; Ritala et al., Plant Mol. Biol 24, (1994) 317-325; Spencer et al., Theor. Appl. Genet. 79 (1990), 625-631), protoplast transformation, the electroporation of partially permeabilized cells, the introduction of DNA by means of glass fibers. In particular the transformation of maize has been described repeatedly in the literature (cf., for example, WO 95/06128; EP 0513849 A1; EP 0465875 A1; EP 0292435 A1; Fromm et al., Biotechnology 8 (1990), 833-844; Gordon-Kamm et al., Plant Cell 2 (1990), 603-618; Koziel et al., Biotechnology 11(1993) 194-200; Moroc et al., Theor Applied Genetics 80 (190) 721-726).

[0203] The successful transformation of other cereal species has also been described, for example in the case of barley (Wan and Lemaux, see above;) Ritala et al., see above; wheat (Nehra et al., Plant J. 5(1994) 285-297).

[0204] Agrobacteria transformed with a vector according to the invention can also be used in the known manner for transforming plants such as test plants such as Arabidopsis or crop plants such as cereals, maize, oats, rye, barley, wheat, soybean, rice, cotton, sugar beet, canola, sunflower, flax, hemp, potato, tobacco, tomato, carrot, capsicum, oilseed rape, tapioca, cassava, arrowroot, marigolds, alfalfa, lettuce and the various tree, nut and grapevine species, for example by bathing scarified leaves or leaf segments in an agrobacterial solution and subsequently growing them in suitable media.

[0205] The genetically modified plant cells can be regenerated via all methods known to the skilled worker. Suitable methods can be found in the abovementioned publications by S. D. Kung and R. Wu, Potrykus or Höfgen and Willmitzer.

[0206] For the purposes of the invention, plants are to be understood as meaning plant cells, plant tissue, plant organs or intact plants such as seeds, tubers, flowers, pollen, fruits, seedlings, roots, leaves, stems or other plant parts. Moreover, plants are to be understood as meaning propagation material such as seeds, fruits, seedlings, slips, tubers, cuttings or rootstocks.

[0207] In principle, suitable organisms or host organisms for the nucleic acid according to the invention, the expression cassette or the vector are advantageously all organisms which are capable of expressing the nucleic acids used in accordance with the invention or which are suitable for the expression of recombinant genes. Plants which may be mentioned by way of example are Arabidopsis, Asteraceae such as Calendula, or crop plants such as soybean, peanut, castor-oil plant, sunflower, maize, cotton, flax, oilseed rape, coconut, oil palm, safflower (Carthamus tinctorius) or cacao, microorganisms such as fungi, for example the genus Mortierella, Saprolegnia or Pythium, bacteria such as the genus Escherichia, yeasts such as the genus Saccharomyces, cyanobacteria, ciliates, algae or protozoans such as dinoflagellates, such as Crypthecodinium. Organisms which naturally synthesize substantial amounts of oils and which may be mentioned by way of example are soybean, oilseed rape, coconut, oil palm, safflower, castor-oil plant, Calendula, peanut, cacao or sunflower. In principle, transgenic animals are also suitable as host organisms, for example C. elegans.

[0208] Preferred transgenic plants are those which comprise a functional or nonfunctional nucleic acid construct according to the invention or a functional or nonfunctional vector according to the invention. For the purposes of the invention, functional means that the nucleic acids used in the method, alone or in the nucleic acid construct or in the vector, are expressed and a biologically active gene product is produced. For the purposes of the invention, nonfunctional means that the nucleic acids used in the method, alone or in the nucleic acid construct or in the vector are not transcribed or not expressed and/or that a biologically inactive gene product is produced. In this sense, what are known as antisense RNAs are also nonfunctional nucleic acids or, upon insertion into the nucleic acid construct or the vector, a nonfunctional nucleic acid construct or nonfunctional vector. To generate transgenic organisms, preferably plants, both the nucleic acid construct according to the invention and the vector according to the invention can be used advantageously.

[0209] For the purposes of the invention, transgenic/recombinantly is to be understood as meaning that the nucleic acids used in the method are not at their natural place in the genome of an organism, it being possible for the nucleic acids to be expressed homologously or heterologously. However, transgenic/recombinantly also means that the nucleic acids according to the invention are at their natural position in the genome of an organism, but that the sequence has been modified compared with the natural sequence and/or that the regulatory sequences of the natural sequences have been modified. Preferably, transgenic/recombinantly is to be understood as meaning the expression of the nucleic acids at a non-natural position in the genome, that is to say homologous or, preferably, heterologous expression of the nucleic acids takes place. The same also applies to the nucleic acid construct according to the invention or the vector.

[0210] Utilizable host cells are furthermore mentioned in: Goeddel, Gene Expression Technology: Methods in Enzymology 185, Academic Press, San Diego, Calif. (1990).

[0211] Expression strains which can be used, for example those which exhibit a lower protease activity, are described in: Gottesman, S., Gene Expression Technology: Methods in Enzymology 185, Academic Press, San Diego, Calif. (1990) 119-128.

[0212] Furthermore, the invention also encompasses the use of the nucleic acids according to the invention, for example of the nucleotide sequences stated in SEQ ID NO: 1, SEQ ID NO: 3, SEQ ID NO: 5, SEQ ID NO: 7, SEQ ID NO: 9, SEQ ID NO: 11, SEQ ID NO: 13, SEQ ID NO: 15, SEQ ID NO: 17, SEQ ID NO: 26, SEQ ID NO: 28, SEQ ID NO: 30, SEQ ID NO: 32, SEQ ID NO: 34, SEQ ID NO: 36, SEQ ID NO: 38, SEQ ID NO: 40, SEQ ID NO: 44, SEQ ID NO: 46, SEQ ID NO: 48, SEQ ID NO: 50, SEQ ID NO: 52, SEQ ID NO: 54, SEQ ID NO: 56, SEQ ID NO: 58, SEQ ID NO: 60, SEQ ID NO: 62, SEQ ID NO: 64, SEQ ID NO: 66, SEQ ID NO: 68, SEQ ID NO: 70, SEQ ID NO: 72, SEQ ID NO: 74, SEQ ID NO: 76, SEQ ID NO: 78, SEQ ID NO: 80, SEQ ID NO: 82, SEQ ID NO: 84, SEQ ID NO: 86, SEQ ID NO: 88, SEQ ID NO: 90, SEQ ID NO: 92, SEQ ID NO: 94, SEQ ID NO: 96, SEQ ID NO: 98, SEQ ID NO: 100, SEQ ID NO: 102, SEQ ID NO: 106 or SEQ ID NO: 108 for generating genetically modified plants which comprise modified proteins of the proteins encoded by SEQ ID NO: 1, SEQ ID NO: 3, SEQ ID NO: 5, SEQ ID NO: 7, SEQ ID NO: 9, SEQ ID NO: 11, SEQ ID NO: 13, SEQ ID NO: 15, SEQ ID NO: 17, SEQ ID NO: 26, SEQ ID NO: 28, SEQ ID NO: 30, SEQ ID NO: 32, SEQ ID NO: 34, SEQ ID NO: 36, SEQ ID NO: 38, SEQ ID NO: 40, SEQ ID NO: 44, SEQ ID NO: 46, SEQ ID NO: 48, SEQ ID NO: 50, SEQ ID NO: 52, SEQ ID NO: 54, SEQ ID NO: 56, SEQ ID NO: 58, SEQ ID NO: 60, SEQ ID NO: 62, SEQ ID NO: 64, SEQ ID NO: 66, SEQ ID NO: 68, SEQ ID NO: 70, SEQ ID NO: 72, SEQ ID NO: 74, SEQ ID NO: 76, SEQ ID NO: 78, SEQ ID NO: 80, SEQ ID NO: 82, SEQ ID NO: 84, SEQ ID NO: 86, SEQ ID NO: 88, SEQ ID NO: 90, SEQ ID NO: 92, SEQ ID NO: 94, SEQ ID NO: 96, SEQ ID NO: 98, SEQ ID NO: 100, SEQ ID NO: 102, SEQ ID NO: 106 or SEQ ID NO: 108 which have a very much lower interaction with the herbicide or whose activity is not interfered with by the herbicide.

[0213] The nucleic acids used in the method according to the invention, in particular SEQ ID NO: 1, SEQ ID NO: 3, SEQ ID NO: 5, SEQ ID NO: 7, SEQ ID NO: 9, SEQ ID NO: 11, SEQ ID NO: 13, SEQ ID NO: 15, SEQ ID NO: 17, SEQ ID NO: 26, SEQ ID NO: 28, SEQ ID NO: 30, SEQ ID NO: 32, SEQ ID NO: 34, SEQ ID NO: 36, SEQ ID NO: 38, SEQ ID NO: 40, SEQ ID NO: 44, SEQ ID NO: 46, SEQ ID NO: 48, SEQ ID NO: 50, SEQ ID NO: 52, SEQ ID NO: 54, SEQ ID NO: 56, SEQ ID NO: 58, SEQ ID NO: 60, SEQ ID NO: 62, SEQ ID NO: 64, SEQ ID NO: 66, SEQ ID NO: 68, SEQ ID NO: 70, SEQ ID NO: 72, SEQ ID NO: 74, SEQ ID NO: 76, SEQ ID NO: 78, SEQ ID NO: 80, SEQ ID NO: 82, SEQ ID NO: 84, SEQ ID NO: 86, SEQ ID NO: 88, SEQ ID NO: 90, SEQ ID NO: 92, SEQ ID NO: 94, SEQ ID NO: 96, SEQ ID NO: 98, SEQ ID NO: 100, SEQ ID NO: 102, SEQ ID NO: 106 or SEQ ID NO: 108, the sequences which have been derived from them on the basis of the degeneracy of the genetic code and their derivatives were identified from a population of transgenic plants, which population has, on the one hand, been transformed by means of Agrobacterium and, while performing this process, novel DNA had been integrated randomly in the chromosome. Backcrosses finally allowed plants to be isolated which contain the identified nucleic acids on both homologous chromosomes. Moreover, these plants have been identified during the screening process as lines which segregate for lethal mutations. As a result of the integration of the novel DNA, these plants show severely impaired growth and development. It can be assumed that this impaired growth and development can be attributed to the fact that the newly inserted DNA has integrated into genes which are important for growth and development, thus limiting or blocking their biological function. This means that these genes and the sequences which have been derived on the basis of the degeneracy of the genetic code and their derivatives encode proteins which, analogously to those described in SEQ ID NO: 1, SEQ ID NO: 3, SEQ ID NO: 5, SEQ ID NO: 7, SEQ ID NO: 9, SEQ ID NO: 11, SEQ ID NO: 13, SEQ ID NO: 15, SEQ ID NO: 17, SEQ ID NO: 26, SEQ ID NO: 28, SEQ ID NO: 30, SEQ ID NO: 32, SEQ ID NO: 34, SEQ ID NO: 36, SEQ ID NO: 38, SEQ ID NO: 40, SEQ ID NO: 44, SEQ ID NO: 46, SEQ ID NO: 48, SEQ ID NO: 50, SEQ ID NO: 52, SEQ ID NO: 54, SEQ ID NO: 56, SEQ ID NO: 58, SEQ ID NO: 60, SEQ ID NO: 62, SEQ ID NO: 64, SEQ ID NO: 66, SEQ ID NO: 68, SEQ ID NO: 70, SEQ ID NO: 72, SEQ ID NO: 74, SEQ ID NO: 76, SEQ ID NO: 78, SEQ ID NO: 80, SEQ ID NO: 82, SEQ ID NO: 84, SEQ ID NO: 86, SEQ ID NO: 88, SEQ ID NO: 90, SEQ ID NO: 92, SEQ ID NO: 94, SEQ ID NO: 96, SEQ ID NO: 98, SEQ ID NO: 100, SEQ ID NO: 102, SEQ ID NO: 106 or SEQ ID NO: 108 constitute suitable target proteins for herbicides to be newly developed.

[0214] In an advantageous embodiment, the stated nucleic acids are overexpressed and the following process steps are advantageously carried out in order to generate such modified proteins:
[0215] a) expression, in a heterologous system, for example a microorganism such as a bacterium of the genus Escherichia, such as E. coli XL1-Red, or in a cell-free system, of the proteins encoded by the nucleic acid sequences shown in SEQ ID NO: 1, SEQ ID NO: 3, SEQ ID NO: 5, SEQ ID NO: 7, SEQ ID NO: 9, SEQ ID NO: 11, SEQ ID NO: 13, SEQ ID NO: 15, SEQ ID NO: 17, SEQ ID NO: 26, SEQ ID NO: 28, SEQ ID NO: 30, SEQ ID NO: 32, SEQ ID NO: 34, SEQ ID NO: 36, SEQ ID NO: 38, SEQ ID NO: 40, SEQ ID NO: 44, SEQ ID NO: 46, SEQ ID NO: 48, SEQ ID NO: 50, SEQ ID NO: 52, SEQ ID NO: 54, SEQ ID NO: 56, SEQ ID NO: 58, SEQ ID NO: 60, SEQ ID NO: 62, SEQ ID NO: 64, SEQ ID NO: 66, SEQ ID NO: 68, SEQ ID NO: 70, SEQ ID NO: 72, SEQ ID NO: 74, SEQ ID NO: 76, SEQ ID NO: 78, SEQ ID NO: 80, SEQ ID NO: 82, SEQ ID NO: 84, SEQ ID NO: 86, SEQ ID NO: 88, SEQ ID NO: 90, SEQ ID NO: 92, SEQ ID NO: 94, SEQ ID NO: 96, SEQ ID NO: 98, SEQ ID NO: 100, SEQ ID NO: 102, SEQ ID NO: 106 or SEQ ID NO: 108 or by a nucleic acid sequence which can be derived on the basis of the degeneracy of the genetic code by backtranslating the amino acid sequences shown in SEQ ID NO: 2, SEQ ID NO: 4, SEQ ID NO: 6, SEQ ID NO: 8, SEQ ID NO: 10, SEQ ID NO: 12, SEQ ID NO: 14, SEQ ID NO: 16, SEQ ID NO: 18, SEQ ID NO: 27, SEQ ID NO: 29, SEQ ID NO: 31, SEQ ID NO: 33, SEQ ID NO: 35, SEQ ID NO: 37, SEQ ID NO: 39, SEQ ID NO: 41, SEQ ID NO: 45, SEQ ID NO: 47, SEQ ID NO: 49, SEQ ID NO: 51, SEQ ID NO: 53, SEQ ID NO: 55, SEQ ID NO: 57, SEQ ID NO: 59, SEQ ID NO: 61, SEQ ID NO: 63, SEQ ID NO: 65, SEQ ID NO: 67, SEQ ID NO: 69, SEQ ID NO: 71, SEQ ID NO: 73, SEQ ID NO: 75, SEQ ID NO: 77, SEQ ID NO: 79, SEQ ID NO: 81, SEQ ID NO: 83, SEQ ID NO: 85, SEQ ID NO: 87, SEQ ID NO: 89, SEQ ID NO: 91, SEQ ID NO: 93, SEQ ID NO: 95, SEQ ID NO: 97, SEQ ID NO: 99, SEQ ID NO: 101, SEQ ID NO: 103, SEQ ID NO: 105, SEQ ID NO: 107 or SEQ ID NO: 109 or of proteins encoded by derivatives or fragments of the nucleic acid sequences shown in SEQ ID NO: 1, SEQ ID NO: 3, SEQ ID NO: 5, SEQ ID NO: 7, SEQ ID NO: 9, SEQ ID NO: 11, SEQ ID NO: 13, SEQ ID NO: 15, SEQ ID NO: 17, SEQ ID NO: 26, SEQ ID NO: 28, SEQ ID NO: 30, SEQ ID NO: 32, SEQ ID NO: 34, SEQ ID NO: 36, SEQ ID NO: 38, SEQ ID NO: 40, SEQ ID NO: 44, SEQ ID NO: 46, SEQ ID NO: 48, SEQ ID NO: 50, SEQ ID NO: 52, SEQ ID NO: 54, SEQ ID NO: 56, SEQ ID NO: 58, SEQ ID NO: 60, SEQ ID NO: 62, SEQ ID NO: 64, SEQ ID NO: 66, SEQ ID NO: 68, SEQ ID NO: 70, SEQ ID NO: 72, SEQ ID NO: 74, SEQ ID NO: 76, SEQ ID NO: 78, SEQ ID NO: 80, SEQ ID NO: 82 oder SEQ ID NO: 84, SEQ ID NO: 86, SEQ ID NO: 88, SEQ ID NO: 90, SEQ ID NO: 92, SEQ ID NO: 94, SEQ ID NO: 96, SEQ ID NO: 98, SEQ ID NO: 100, SEQ ID NO: 102, SEQ ID NO: 106, SEQ ID NO: 108 which encode polypeptides with the amino acid sequences shown in SEQ ID NO: 2, SEQ ID NO: 4, SEQ ID NO: 6, SEQ ID NO: 8, SEQ ID NO: 10, SEQ ID NO: 12, SEQ ID NO: 14, SEQ ID NO: 16, SEQ ID NO: 18, SEQ ID NO: 27, SEQ ID NO: 29, SEQ ID NO: 31, SEQ ID NO: 33, SEQ ID NO: 35, SEQ ID NO: 37, SEQ ID NO: 39, SEQ ID NO: 41, SEQ ID NO: 45, SEQ ID NO: 47, SEQ ID NO: 49, SEQ ID NO: 51, SEQ ID NO: 53, SEQ ID NO: 55, SEQ ID NO: 57, SEQ ID NO: 59, SEQ ID NO: 61, SEQ ID NO: 63, SEQ ID NO: 65, SEQ ID NO: 67, SEQ ID NO: 69, SEQ ID NO: 71, SEQ ID NO: 73, SEQ ID NO: 75, SEQ ID NO: 77, SEQ ID NO: 79, SEQ ID NO: 81, SEQ ID NO: 83, SEQ ID NO: 85, SEQ ID NO: 87, SEQ ID NO: 89, SEQ ID NO: 91, SEQ ID NO: 93, SEQ ID NO: 95, SEQ ID NO: 97, SEQ ID NO: 99, SEQ ID NO: 101, SEQ ID NO: 103, SEQ ID NO: 105, SEQ ID NO: 107 or SEQ ID NO: 109 and which have at least 50%, 60%, preferably 70%, 80%, 90% or more homology at the amino acid level,
[0216] b) randomized or directed mutagenesis of the protein by modification of the nucleic acid,
[0217] c) measuring the interaction or the biological activity of the modified protein with the herbicide, or in the presence of the herbicide,
[0218] d) identification of derivatives of the protein which exhibit a lesser degree of interaction or a biological activity which has been affected to a lesser degree,
[0219] e) assaying the biological activity of the protein following application of the herbicide.

[0220] The resulting modified protein, or the modified nucleic acid, for example of the sequences stated under SEQ ID NO: 1, SEQ ID NO: 3, SEQ ID NO: 5, SEQ ID NO: 7, SEQ ID NO: 9, SEQ ID NO: 11, SEQ ID NO: 13, SEQ ID NO: 15, SEQ ID NO: 17, SEQ ID NO: 26, SEQ ID NO: 27, SEQ ID NO: 30, SEQ ID NO: 32, SEQ ID NO: 34, SEQ ID NO: 36, SEQ ID NO: 38, SEQ ID NO: 40, SEQ ID NO: 44, SEQ ID NO: 46, SEQ ID NO: 48, SEQ ID NO: 50, SEQ ID NO: 52, SEQ ID NO: 54, SEQ ID NO: 56, SEQ ID NO: 58, SEQ ID NO: 60, SEQ ID NO: 62, SEQ ID NO: 64, SEQ ID NO: 66, SEQ ID NO: 68, SEQ ID NO: 70, SEQ ID NO: 72, SEQ ID NO: 74, SEQ ID NO: 76, SEQ ID NO: 78, SEQ ID NO: 80, SEQ ID NO: 82, SEQ ID NO: 84, SEQ ID NO: 86, SEQ ID NO: 88, SEQ ID NO: 90, SEQ ID NO: 92, SEQ ID NO: 94, SEQ ID NO: 96, SEQ ID NO: 98, SEQ ID NO: 100, SEQ ID NO: 102, SEQ ID NO: 106 or SEQ ID NO: 108 and the other sequences described above, for example derivatives and fragments, for example of other plants, are advantageously transferred into an organism, advantageously into a plant, preferably plant cells.

[0221] A further embodiment of the invention is a method for generating modified gene products encoded by the nucleic acid sequences SEQ ID NO: 1, SEQ ID NO: 3, SEQ ID NO: 5, SEQ ID NO: 7, SEQ ID NO: 9, SEQ ID NO: 11, SEQ ID NO: 13, SEQ ID NO: 15, SEQ ID NO: 17, SEQ ID NO: 26, SEQ ID NO: 28, SEQ ID NO: 30, SEQ ID NO: 32, SEQ ID NO: 34, SEQ ID NO: 36, SEQ ID NO: 38, SEQ ID NO: 40, SEQ ID NO: 44, SEQ ID NO: 46, SEQ ID NO: 48, SEQ ID NO: 50, SEQ ID NO: 52, SEQ ID NO: 54, SEQ ID NO: 56, SEQ ID NO: 58, SEQ ID NO: 60, SEQ ID NO: 62, SEQ ID NO: 64, SEQ ID NO: 66, SEQ ID NO: 68, SEQ ID NO: 70, SEQ ID NO: 72, SEQ ID NO: 74, SEQ ID NO: 76, SEQ ID NO: 78, SEQ ID NO: 80, SEQ ID NO: 82, SEQ ID NO: 84, SEQ ID NO: 86, SEQ ID NO: 88, SEQ ID NO: 90, SEQ ID NO: 92, SEQ ID NO: 94, SEQ ID NO: 96, SEQ ID NO: 98, SEQ ID NO: 100, SEQ ID NO: 102, SEQ ID NO: 106 oder SEQ ID NO: 108 according to the invention and described herein which comprises the following process steps:
[0222] a) expression of the proteins encoded by SEQ ID NO: 1, SEQ ID NO: 3, SEQ ID NO: 5, SEQ ID NO: 7, SEQ ID NO: 9, SEQ ID NO: 11, SEQ ID NO: 13, SEQ ID NO: 15, SEQ ID NO: 17, SEQ ID NO: 26, SEQ ID NO: 28, SEQ ID NO: 30, SEQ ID NO: 32, SEQ ID NO: 34, SEQ ID NO: 36, SEQ ID NO: 38, SEQ ID NO: 40, SEQ ID NO: 44, SEQ ID NO: 46, SEQ ID NO: 48, SEQ ID NO: 50, SEQ ID NO: 52, SEQ ID NO: 54, SEQ ID NO: 56, SEQ ID NO: 58, SEQ ID NO: 60, SEQ ID NO: 62, SEQ ID NO: 64, SEQ ID NO: 66, SEQ ID NO: 68, SEQ ID NO: 70, SEQ ID NO: 72, SEQ ID NO: 74, SEQ ID NO: 76, SEQ ID NO: 78, SEQ ID NO: 80, SEQ ID NO: 82, SEQ ID NO: 84, SEQ ID NO: 86, SEQ ID NO: 88, SEQ ID NO: 90, SEQ ID NO: 92, SEQ ID NO: 94, SEQ ID NO: 96, SEQ ID NO: 98, SEQ ID NO: 100, SEQ ID NO: 102, SEQ ID NO: 106 or SEQ ID NO: 108 or their derivatives or fragments in a heterologous system or in a cell-free system
[0223] b) randomized or directed mutagenesis of the protein by modification of the nucleic acid,
[0224] c) measuring the interaction or the biological activity of the modified gene product with the herbicide, or in the presence of the herbicide,
[0225] d) identification of derivatives of the protein which exhibit a lesser degree of interaction or whose activity is less affected,
[0226] e) assaying the biological activity of the protein following application of the herbicide,
[0227] f) selection of the nucleic acid sequences which, or whose gene products, show a modified biological activity with regard to the herbicide, preferably a reduced inhibition by the herbicide or a lesser degree of interaction with the herbicide.

[0228] The sequences selected by the above-described method are advantageously introduced into an organism. Therefore, the invention furthermore relates to an organism generated by this method, the organism preferably being a plant. The method is also suitable for the gene expression of the abovementioned biologically active derivatives and fragments.

[0229] Subsequently, intact plants are regenerated and the resistance to the herbicide is tested in intact plants.

[0230] Modified proteins and/or nucleic acids which, in plants, can mediate resistance to herbicides can also be generated from the sequences according to the invention described herein, in particular from the sequences SEQ ID NO: 1, SEQ ID NO: 3, SEQ ID NO: 5, SEQ ID NO: 7, SEQ ID NO: 9, SEQ ID NO: 11, SEQ ID NO: 13, SEQ ID NO: 15, SEQ ID NO: 17, SEQ ID NO: 26, SEQ ID NO: 28, SEQ ID NO: 30, SEQ ID NO: 32, SEQ ID NO: 34, SEQ ID NO: 36, SEQ ID NO: 38, SEQ ID NO: 40, SEQ ID NO: 44, SEQ ID NO: 46, SEQ ID NO: 48, SEQ ID NO: 50, SEQ ID NO: 52, SEQ ID NO: 54, SEQ ID NO: 56, SEQ ID NO: 58, SEQ ID NO: 60, SEQ ID NO: 62, SEQ ID NO: 64, SEQ ID NO: 66, SEQ ID NO: 68, SEQ ID NO: 70, SEQ ID NO: 72, SEQ ID NO: 74, SEQ ID NO: 76, SEQ ID NO: 78, SEQ ID NO: 80, SEQ ID NO: 82, SEQ ID NO: 84, SEQ ID NO: 86, SEQ ID NO: 88, SEQ ID NO: 90, SEQ ID NO: 92, SEQ ID NO: 94, SEQ ID NO: 96, SEQ ID NO: 98, SEQ ID NO: 100, SEQ ID NO: 102, SEQ ID NO: 106 or SEQ ID NO: 108 or their derivatives from other plants via what is known as site-directed mutagenesis. For example, the stability and/or enzymatic activity of enzymes or the properties such as the binding of low-molecular-weight compounds with less than 1000 daltons, advantageously less than 900 daltons, preferably less than 800, especially preferably less than 700, very especially preferably less than 600 daltons, of proteins or of antisense RNA can be improved or modified in a highly targeted fashion by means of this mutagenesis.

[0231] Moreover, modifications may be achieved by the PCR method described by Spee et al. (Nucleic Acids Research, Vol. 21, No. 3, 1993: 777-78), using dITP for the random mutagenesis, or by the further improved method of Rellos et al. (Protein Expr. Purif., 5, 1994 : 270-277).

[0232] A further possibility of generating these modified proteins and/or nucleic acids is the in vitro recombination technique described by Stemmer et al. (Proc. Natl. Acad. Sci. USA, Vol. 91, 1994: 10747-10751) for molecular evolution or the combination of the PCR and recombination method, which has been described by Moore et al. (Nature Biotechnology Vol. 14, 1996: 458-467).

[0233] A further way of mutating nucleic acids and proteins is described by Greener et al. in Methods in Molecular Biology (Vol. 57, 1996: 375-385). EP-A-0 909 821 describes a method of modifying proteins using the microorganism E. coli XL-1 Red. Upon replication, this microorganism generates mutations in the introduced nucleic acids and thus leads to a modification of the genetic information. Advantageous nucleic acids and the proteins encoded by them can be identified readily via isolation of the modified nucleic acids or the modified proteins and carrying out of resistance testing, and vice versa. After introduction into plants, they can manifest resistance therein and thus lead to resistance to the herbicides.

[0234] Further methods of mutagenesis and selection are, for example, methods such as the in vivo mutagenesis of seeds or pollen and selection of resistant alleles in the presence of the inhibitors according to the invention, followed by the genetic and molecular identification of the modified, resistant allele. Furthermore, the mutagenesis and selection of resistances in cell culture by propagating the culture in the presence of successively increasing concentrations of the inhibitors according to the invention. In doing so, the increase in the spontaneous mutation rate by chemical/physical mutagenic treatment may be exploited. As described above, modified genes may also be isolated using microorganisms which have an endogenous or recombinant activity of the proteins encoded by the nucleic acids used in the method according to the invention, which microorganisms are sensitive to the inhibitors identified in accordance with the invention. Growing the microorganisms on media with increasing concentrations of inhibitors according to the invention permits the selection and evolution of resistant variants of the targets according to the invention. The frequency of the mutations, in turn, can be increased by mutagenic treatments.

[0235] In addition, methods are available for the targeted modifications of nucleic acids (Zhu et al. Proc. Natl. Acad. Sci. USA, Vol. 96, 8768-8773 and Beethem et al., Proc. Natl. Acad. Sci. USA, Vol 96, 8774-8778). These methods make it possible to replace, in the proteins, those amino acids which are of importance for binding inhibitors by functionally equivalent amino acids which, however, inhibit the binding of the inhibitor.

[0236] The invention therefore furthermore relates to a method of generating nucleotide sequences which encode gene products with a modified biological activity, the biological activity being modified such that an increased activity is present. Increased activity is to be understood as meaning an activity which is increased over the original organism, or over the original gene product, by at least 10%, preferably by at least 30%, especially preferably by at least 50% or 70%, very especially preferably by at least 100%. Moreover, the biological activity may have been modified such that the substances and/or compositions according to the invention no longer, or no longer correctly, bind to the nucleic acid sequences and/or the gene products encoded by them. No longer, or no longer correctly, is to be understood as meaning for the purposes of the invention that the substances bind at least 30% less, preferably at least 50% less, especially referably at least 70% less, very especially preferably at least 80% less or not at all to the modified nucleic acids and/or gene products in comparison with the original gene product or the original nucleic acids.

[0237] Yet a further aspect of the invention therefore relates to a transgenic plant which has been genetically modified by the above-described method according to the invention.

[0238] Genetically modified transgenic plants which are resistant to the substances found in accordance with the methods according to the invention and/or to compositions comprising these substances may also be generated by overexpressing the nucleic acids, in particular with the sequences SEQ ID NO: 1, SEQ ID NO: 3, SEQ ID NO: 5, SEQ ID NO: 7, SEQ ID NO: 9, SEQ ID NO: 11, SEQ ID NO: 13, SEQ ID NO: 15, SEQ ID NO: 17, SEQ ID NO: 26, SEQ ID NO: 28, SEQ ID NO: 30, SEQ ID NO: 32, SEQ ID NO: 34, SEQ ID NO: 36, SEQ ID NO: 38, SEQ ID NO: 40, SEQ ID NO: 44, SEQ ID NO: 46, SEQ ID NO: 48, SEQ ID NO: 50, SEQ ID NO: 52, SEQ ID NO: 54, SEQ ID NO: 56, SEQ ID NO: 58, SEQ ID NO: 60, SEQ ID NO: 62, SEQ ID NO: 64, SEQ ID NO: 66, SEQ ID NO: 68, SEQ ID NO: 70, SEQ ID NO: 72, SEQ ID NO: 74, SEQ ID NO: 76, SEQ ID NO: 78, SEQ ID NO: 80, SEQ ID NO: 82, SEQ ID NO: 84, SEQ ID NO: 86, SEQ ID NO: 88, SEQ ID NO: 90, SEQ ID NO: 92, SEQ ID NO: 94, SEQ ID NO: 96, SEQ ID NO: 98, SEQ ID NO: 100, SEQ ID NO: 102, SEQ ID NO: 106 or SEQ ID NO: 108 used in the methods according to the invention. The invention therefore furthermore relates to a method of generating transgenic plants which are resistant to substances which have been found by a method according to the invention, wherein nucleic acids according to the invention with one of the above-described biological activities in particular with the sequences SEQ ID NO: 1, SEQ ID NO: 3, SEQ ID NO: 5, SEQ ID NO: 7, SEQ ID NO: 9, SEQ ID NO: 11, SEQ ID NO: 13, SEQ ID NO: 15, SEQ ID NO: 17, SEQ ID NO: 26, SEQ ID NO: 27, SEQ ID NO: 30, SEQ ID NO: 32, SEQ ID NO: 34, SEQ ID NO: 36, SEQ ID NO: 38, SEQ ID NO: 40, SEQ ID NO: 44, SEQ ID NO: 46, SEQ ID NO: 48, SEQ ID NO: 50, SEQ ID NO: 52, SEQ ID NO: 54, SEQ ID NO: 56, SEQ ID NO: 58, SEQ ID NO: 60, SEQ ID NO: 62, SEQ ID NO: 64, SEQ ID NO: 66, SEQ ID NO: 68, SEQ ID NO: 70, SEQ ID NO: 72, SEQ ID NO: 74, SEQ ID NO: 76, SEQ ID NO: 78, SEQ ID NO: 80, SEQ ID NO: 82, SEQ ID NO: 84, SEQ ID NO: 86, SEQ ID NO: 88, SEQ ID NO: 90, SEQ ID NO: 92, SEQ ID NO: 94, SEQ ID NO: 96, SEQ ID NO: 98, SEQ ID NO: 100, SEQ ID NO: 102, SEQ ID NO: 106 or SEQ ID NO: 108 are overexpressed in these plants. A similar method is described, for example, in Lermantova et al., Plant Physiol., 122, 2000: 75-83. Naturally, the derivatives and fragments mentioned herein which have the desired activity may also be used, for example those from other plants.

[0239] The above-described methods according to the invention for generating resistant plants make possible the development of novel herbicides which have as complete as possible an action which is independent of the plant species (what are known as nonselective herbicides), in combination with the development of useful plants which are resistant to the nonselective herbicide. Useful plants which are resistant to nonselective herbicides have already been described on several occasions. In this context, one can distinguish between several principles for achieving a resistance:
[0240] a) Generation of resistance in a plant via mutation methods or recombinant methods by markedly overproducing the protein which acts as target for the herbicide and by the fact that, owing to the large excess of the protein which acts as target for the herbicide, the function exerted by this protein in the cell is even retained after application of the herbicide.
[0241] b) Modification of the plant such that a modified version of the protein which acts as target of the herbicide is introduced and that the function of the newly introduced modified protein is not adversely affected by the herbicide.
[0242] c) Modification of the plant such that a novel protein/a novel RNA is introduced wherein the chemical structure of the protein or of the nucleic acid, such as of the RNA or the DNA, which structure is responsible for the herbicidal action of the low-molecular-weight substance, is modified so that, owing to the modified structure, a herbicidal action can no longer be developed or that the herbicide in the modified plant is inactivated or modified, for example catabolized, not taken up or not transported or transported into the vacuole, and the like, that is to say that the interaction of the herbicide with the target can no longer take place.
[0243] d) The function of the target is replaced by a novel nucleic acid introduced into the plant, for example a gene, the nucleic acid encoding a gene product whose function is inhibited to a lesser degree or not at all by the herbicidal substance. In this manner, for example, what is known as an alternative pathway is created.
[0244] e) The function of the target is taken over by another gene which is present in the plant or introduced into the plant, or by its gene product.

[0245] The present invention therefore furthermore relates to the use of plants comprising the genes affected by T-DNA insertion which have the nucleic acid sequences SEQ ID NO: 1, SEQ ID NO: 3, SEQ ID NO: 5, SEQ ID NO: 7, SEQ ID NO: 9, SEQ ID NO: 11, SEQ ID NO: 13, SEQ ID NO: 15, SEQ ID NO: 17, SEQ ID NO: 26, SEQ ID NO: 28, SEQ ID NO: 30, SEQ ID NO: 32, SEQ ID NO: 34, SEQ ID NO: 36, SEQ ID NO: 38, SEQ ID NO: 40, SEQ ID NO: 44, SEQ ID NO: 46, SEQ ID NO: 48, SEQ ID NO: 50, SEQ ID NO: 52, SEQ ID NO: 54, SEQ ID NO: 56, SEQ ID NO: 58, SEQ ID NO: 60, SEQ ID NO: 62, SEQ ID NO: 64, SEQ ID NO: 66, SEQ ID NO: 68, SEQ ID NO: 70, SEQ ID NO: 72, SEQ ID NO: 74, SEQ ID NO: 76, SEQ ID NO: 78, SEQ ID NO: 80, SEQ ID NO: 82, SEQ ID NO: 84, SEQ ID NO: 86, SEQ ID NO: 88, SEQ ID NO: 90, SEQ ID NO: 92, SEQ ID NO: 94, SEQ ID NO: 96, SEQ ID NO: 98, SEQ ID NO: 100, SEQ ID NO: 102, SEQ ID NO: 106 or SEQ ID NO: 108 used in the method according to the invention or the other sequences mentioned, for example fragments and derivatives, for example from other plants, for the development of novel herbicides. The skilled worker is familiar with alternative methods of identifying homologous nucleic acids, for example in other plants with similar sequences, such as, for example, using transposons. The present invention therefore also relates to the use of alternative insertion mutagenesis methods for inserting foreign nucleic acid into the nucleic acid sequences SEQ ID NO: 1, SEQ ID NO: 3, SEQ ID NO: 5, SEQ ID NO: 7, SEQ ID NO: 9, SEQ ID NO: 11, SEQ ID NO: 13, SEQ ID NO: 15, SEQ ID NO: 17, SEQ ID NO: 26, SEQ ID NO: 28, SEQ ID NO: 30, SEQ ID NO: 32, SEQ ID NO: 34, SEQ ID NO: 36, SEQ ID NO: 38, SEQ ID NO: 40, SEQ ID NO: 44, SEQ ID NO: 46, SEQ ID NO: 48, SEQ ID NO: 50, SEQ ID NO: 52, SEQ ID NO: 54, SEQ ID NO: 56, SEQ ID NO: 58, SEQ ID NO: 60, SEQ ID NO: 62, SEQ ID NO: 64, SEQ ID NO: 66, SEQ ID NO: 68, SEQ ID NO: 70, SEQ ID NO: 72, SEQ ID NO: 74, SEQ ID NO: 76, SEQ ID NO: 78, SEQ ID NO: 80, SEQ ID NO: 82, SEQ ID NO: 84, SEQ ID NO: 86, SEQ ID NO: 88, SEQ ID NO: 90, SEQ ID NO: 92, SEQ ID NO: 94, SEQ ID NO: 96, SEQ ID NO: 98, SEQ ID NO: 100, SEQ ID NO: 102, SEQ ID NO: 106 or SEQ ID NO: 108 according to the invention and described here, into sequences derived from these sequences on the basis of the genetic code and/or their derivatives or fragments, for example those from other plants.

[0246] The invention therefore furthermore relates to substances as described above, identified by the methods according to the invention, the substance having a molecular weight of less than 1000 daltons, advantageously less than 900 daltons, preferably less than 800 daltons, especially preferably less than 700 daltons, very especially preferably less than 600 daltons, a Ki value of under 1 mM and fewer than three hydroxyl groups on a carbon-atom-containing ring, the substance being a proteinogenic substance or an antisense RNA.

[0247] A further embodiment of the invention are substances which have been identified by the methods according to the invention described hereinabove, the substances being an antibody to the protein encoded by sequences SEQ ID NO: 1, SEQ ID NO: 3, SEQ ID NO: 5, SEQ ID NO: 7, SEQ ID NO: 9, SEQ ID NO: 11, SEQ ID NO: 13, SEQ ID NO: 15, SEQ ID NO: 17, SEQ ID NO: 26, SEQ ID NO: 28, SEQ ID NO: 30, SEQ ID NO: 32, SEQ ID NO: 34, SEQ ID NO: 36, SEQ ID NO: 38, SEQ ID NO: 40, SEQ ID NO: 44, SEQ ID NO: 46, SEQ ID NO: 48, SEQ ID NO: 50, SEQ ID NO: 52, SEQ ID NO: 54, SEQ ID NO: 56, SEQ ID NO: 58, SEQ ID NO: 60, SEQ ID NO: 62, SEQ ID NO: 64, SEQ ID NO: 66, SEQ ID NO: 68, SEQ ID NO: 70, SEQ ID NO: 72, SEQ ID NO: 74, SEQ ID NO: 76, SEQ ID NO: 78, SEQ ID NO: 80, SEQ ID NO: 82, SEQ ID NO: 84, SEQ ID NO: 86, SEQ ID NO: 88, SEQ ID NO: 90, SEQ ID NO: 92, SEQ ID NO: 94, SEQ ID NO: 96, SEQ ID NO: 98, SEQ ID NO: 100, SEQ ID NO: 102, SEQ ID NO: 106 or SEQ ID NO: 108 or derivatives or fragments of this protein.

[0248] The antibodies can also bind more than one of the abovementioned sequences as long as the binding is specific, i.e. capable of being identified or assayed by means of the abovementioned methods.

[0249] These substances are advantageously distinguished by their herbicidal action which can be identified by means of the above-described methods.

[0250] The invention furthermore relates to compositions comprising a herbicidally active amount of at least one substance identified by one of the methods according to the invention or of an antagonist identified by a method according to the invention, and at least one inert liquid and/or solid carrier and, if appropriate, at least one surface-active substance.

[0251] A further embodiment are compositions comprising a growth-regulatory amount of at least one substance identified by the methods according to the invention or of an antagonist identified by a method according to the invention, and at least one inert liquid and/or solid carrier and, if appropriate, at least one surface-active substance.

[0252] These substances or compositions according to the invention with their herbicidal action can be used as defoliants, desiccants, haulm killers and, in particular, as weed killers. Weeds are to be understood as meaning, in the broadest sense, all plants which grow in locations where they are undesired. Whether the substances or active ingredients found with the aid of the methods according to the invention act as nonselective or selective herbicides depends, inter alia, on the amount used, their selectivity and other factors. For example, the substances can be used against the following weeds:

[0253] Dicotyledonous weeds of the genera:
[0254] Sinapis, Lepidium, Galium, Stellaria, Matricaria, Anthemis, Galinsoga, Chenopodium, Urtica, Senecio, Amaranthus, Portulaca, Xanthium, Convolvulus, Ipomoea, Polygonum, Sesbania, Ambrosia, Cirsium, Carduus, Sonchus, Solanum, Rorippa, Rotala, Lindernia, Lamium, Veronica, Abutilon, Emex, Datura, Viola, Galeopsis, Papaver, Centaurea, Trifolium, Ranunculus, Taraxacum.

[0255] Monocotyledonous weeds of the genera:
[0256] Echinochloa, Setaria, Panicum, Digitaria, Phleum, Poa, Festuca, Eleusine, Brachiaria, Lolium, Bromus, Avena, Cyperus, Sorghum, Agropyron, Cynodon, Monochoria, Fimbristyslis, Sagittaria, Eleocharis, Scirpus, Paspalum, Ischaemum, Sphenoclea, Dactyloctenium, Agrostis, Alopecurus, Apera.

[0257] Depending on the application method in question, the substances identified in the method according to the invention, or compositions comprising them, may advantageously also be employed in a further number of crop plants for eliminating undesired plants. Examples of suitable crops are:
[0258] Allium cepa, Ananas comosus, Arachis hypogaea, Asparagus officinalis, Beta vulgaris spec. altissima, Beta vulgaris spec. rapa, Brassica napus var. napus, Brassica napus var. napobrassica, Brassica rapa var. silvestris, Camellia sinensis, Carthamus tinctorius, Carya illinoinensis, Citrus limon, Citrus sinensis, Coffea arabica (Coffea canephora, Coffea liberica), Cucumis sativus, Cynodon dactylon, Daucus carota, Elaeis guineensis, Fragaria vesca, Glycine max, Gossypium hirsutum, (Gossypium arboreum, Gossypium herbaceum, Gossypium vitifolium), Helianthus annuus, Hevea brasiliensis, Hordeum vulgare, Humulus lupulus, Ipomoea batatas, Juglans regia, Lens culinaris, Linum usitatissimum, Lycopersicon lycopersicum, Malus spec., Manihot esculenta, Medicago sativa, Musa spec., Nicotiana tabacum (N.rustica), Olea europaea, Oryza sativa, Phaseolus lunatus, Phaseolus vulgaris, Picea abies, Pinus spec., Pisum sativum, Prunus avium, Prunus persica, Pyrus communis, Ribes sylestre, Ricinus communis, Saccharum officinarum, Secale cereale, Solanum tuberosum, Sorghum bicolor (s. vulgare), Theobroma cacao, Trifolium pratense, Triticum aestivum, Triticum durum, Vicia faba, Vitis vinifera, Zea mays.

[0259] The substances found by the method according to the invention can also be used advantageously in crops which tolerate the action of herbicides owing to breeding, including recombinant methods.

[0260] The substances according to the invention, or the herbicidal compositions comprising them, can be applied, for example, in the form of directly sprayable aqueous solutions, powders, suspensions, also highly concentrated aqueous, oily or other suspensions or dispersions, emulsions, oil dispersions, pastes, dusts, materials for spreading or granules by means of spraying, atomizing, dusting, spreading or pouring. The use forms depend on the intended purposes; in any case, they should guarantee the finest possible distribution of the active ingredients according to the invention.

[0261] Suitable inert liquid and/or solid carriers are liquid additives such as mineral oil fractions of medium to high boiling point, such as kerosine or diesel oil, furthermore coal tar oils and oils of vegetable or animal origin, aliphatic, cyclic and aromatic hydrocarbons, for example paraffin, tetrahydronaphthalene, alkylated naphthalenes or their derivatives, alkylated benzenes or their derivatives, alcohols such as methanol, ethanol, propanol, butanol, cyclohexanol, ketones such as cyclohexanone or strongly polar solvents, for example amines such as N-methylpyrrolidone or water.

[0262] Further advantageous embodiments of the substances and/or compositions according to the invention are aqueous use forms such as emulsion concentrates, suspensions, pastes, wettable powders or water-dispersible granules, which can be prepared, for example, by adding water. To prepare emulsions, pastes or oil dispersions, the substances and/or compositions, what are known as the substrates, as such or dissolved in an oil or solvent, may be homogenized in water by means of wetter, adhesive, dispersant or emulsifier. However, concentrates composed of active substance, wetter, adhesive, dispersant or emulsifier and, if appropriate, solvent or oil may be prepared, and these concentrates are suitable for dilution with water.

[0263] Suitable surface-active substances are the alkali metal salts, alkaline earth metal salts and ammonium salts of aromatic sulfonic acids, for example lignosulfonic acid, phenolsulfonic acid, naphthalenesulfonic acid and dibutylnaphthalenesulfonic acid, and of fatty acids, alkylsulfonates and alkylarylsulfonates, alkylsulfates, lauryl ether sulfates and fatty alcohol sulfates, and salts of sulfated hexa-, hepta- and octadecanols, and of fatty alcohol glycol ether, condensates of sulfonated naphthalene, and its derivatives with formaldehyde, condensates of naphthalene or of the naphthalenesulfonic acids with phenol and formaldehyde, polyoxyethylene octylphenyl ether, ethoxylated isooctylphenol, octylphenol or nonylphenol, alkylphenyl polyglycol ethers, tributylphenyl polyglycol ethers, alkylaryl polyether alcohols, isotridecyl alcohol, fatty alcohol/ethylene oxide condensates, ethoxylated castor oil, polyoxyethylene alkyl ethers or polyoxypropylene alkyl ethers, lauryl alcohol polyglycol ether acetate, sorbitol esters, lignin-sulfite waste liquors or methylcellulose.

[0264] Powders, materials for spreading and dusts as solid carriers can be prepared advantageously by mixing or concomitantly grinding the active substances with a solid carrier.

[0265] Granules, for example coated granules, impregnated granules and homogeneous granules, can be prepared by binding the active ingredients to solid carriers. Examples of solid carriers are mineral earths such as silicas, silica gels, silicates, talc, kaolin, limestone, lime, chalk, bole, loess, clay, dolomite, diatomaceous earth, calcium sulfate, magnesium sulfate, magnesium oxide, ground synthetic materials, fertilizers such as ammonium sulfate, ammonium phosphate, ammonium nitrate, ureas and products of vegetable origin such as cereal meal, tree bark meal, wood meal and nutshell meal, cellulose powders or other solid carriers.

[0266] The concentrations of the substances and/or compositions according to the invention in the ready-to-use preparations can be varied within wide ranges. In general, the formulations comprise 0.001 to 98% by weight, preferably 0.01 to 95% by weight, of at least one active ingredient. In this context, the active ingredients are employed in a purity of 90% to 100%, preferably 95% to 100% (according to NMR spectrum).

[0267] The herbicidal compositions or the substances can be applied pre- or post-emergence. If the active ingredients are less well tolerated by specific crop plants, application techniques may be used in which the herbicidal compositions or substances are sprayed, with the aid of the spraying apparatus, in such a way that coming into contact with the leaves of the sensitive crop plants is avoided as far as possible, while the active ingredients reach the leaves of undesired plants which grow underneath, or the bare soil surface (post-directed, lay-by).

[0268] To widen the spectrum of action and to achieve synergistic effects, the substances and/or compositions according to the invention may be mixed with a large number of representatives of other groups of herbicidal or growth-regulatory active ingredients and applied concomitantly. Suitable examples of components in mixtures are 1,2,4-thiadiazoles, 1,3,4-thiadiazoles, amides, aminophosphoric acid and its derivatives, aminotriazoles, anilides, (het)-aryloxyalkanoic acids and their derivatives, benzoic acid and its derivatives, benzothiadiazinones, 2-aroyl-1,3-cyclohexanediones, hetaryl aryl ketones, benzylisoxazolidinones, meta-CF₃-phenyl derivatives, carbamates, quinolinecarboxylic acid and its derivatives, chloroacetanilides, cyclohexane-1,3-dione derivatives, diazines, dichloropropionic acid and its derivatives, dihydrobenzofurans, dihydrofuran-3-ones, dinitroanilines, dinitrophenols, diphenyl ethers, dipyridyls, halocarboxylic acids and their derivatives, ureas, 3-phenyluracils, imidazoles, imidazolinones, N-phenyl-3,4,5,6-tetrahydrophthalimides, oxadiazoles, oxiranes, phenols, aryloxy- or heteroaryloxyphenoxypropionic esters, phenylacetic acid and its derivatives, phenylpropionic acid and its derivatives, pyrazoles, phenylpyrazoles, pyridazines, pyridinecarboxylic acid and its derivatives, pyrimidyl ethers, sulfonamides, sulfonylureas, triazines, triazinones, triazolinones, triazolecarboxamides, uracils.

[0269] Moreover, it may be useful to apply the substances and/or compositions according to the invention, alone or in combination with other herbicides, as a joint mixture together with other crop protection agents, for example with agents for controlling pests or phytopathogenic fungi or bacteria. Also of interest is the miscibility with mineral salt solutions which are employed for alleviating nutritional and trace element deficiencies. Nonphytotoxic oils and oil concentrates may also be added.

[0270] Depending on the intended aim of the control measures, the season, the target plants and the growth stage, the application rate of active ingredient (=substance and/or composition) is from 0.001 to 3.0, preferably 0.01 to 1.0, kg of active substance per ha.

[0271] The invention furthermore relates to the use of a substance identified by one of the methods or compositions according to the invention comprising these substances for use as a herbicide or for regulating the growth of plants.

[0272] Moreover, the invention relates to a kit encompassing the nucleic acid construct according to the invention, the substances according to the invention, for example the antibody according to the invention, the antisense nucleic acid molecule according to the invention and/or an antagonist and/or a herbicidal substance identified in accordance with the methods according to the invention, and the composition described hereinbelow.

[0273] The invention furthermore relates to a composition comprising the substance according to the invention, the antibody according to the invention, the antisense nucleic acid construct according to the invention and/or an antagonist according to the invention and/or a substance according to the invention identified by a method according to the invention.

[0274] The invention is illustrated in greater detail by the examples which follow, which should not be taken as limiting.

### EXAMPLES

a) Molecular-Biological Methods

[0275] Molecular-biological methods as employed herein are those of the prior art and are described in various references such as, for example, Sambrook et al., Molecular Cloning, eds., Cold Spring Harbor Laboratory Press, Cold Spring Harbor, N.Y. (1989), Reiter et al., Methods in Arabidopsis Research, World Scientific Press (1992), Schultz et al., Plant Molecular Biology Manual, Kluwer Academic Publishers (1998) and Martinez-Zapater and Salinas, Methods in Molecular Biology, Vol. 82: Arabidopsis Protocols eds., Humana Press Inc., Totowa, N.J. These references describe the customary standard methods for the production, identification and cloning of mutants caused by T-DNA insertions. In addition, a further customary method for the identification of insertion sites as was described, for example, by Spertini et al., Biotechniques 27: 308-314 (1999), was resorted to. The sequencing was carried out by AGOWA (Berlin).

b) Materials

[0276] Unless otherwise specified in the text, the chemicals used were obtained in analytical-grade quality from Fluka (Neu-Ulm), Merck (Darmstadt), Roth (Karlsruhe), Serva (Heidelberg) and Sigma (Deideshofen). Solutions were prepared using pure, pyrogen-free water, referred to in the text as 1110, obtained from an ion-exchange system by TKA (Niederelbert). Restriction nucleases, DNA-modifying enzymes and molecular biology kits and oligonucleotides were obtained from Amersham Pharmacia (Freiburg), Biometra (Göttingen), Dynal (Hamburg), Gibco-BRL (Gaithersburg, Md., USA), Invitrogen (Groningen, Netherlands), MBI Fermentas (St. Leon Rot), New England Biolabs (Schwalbach, Taunus), Novagen (Madison, Wisc., USA), Qiagen (Hilden), Roche Diagnostics (Mannheim), Stratagene (Amsterdam, Netherlands), TTB-Molbiol (Berlin). Unless otherwise specified, the products were employed in accordance with the manufacturers' instructions.

c) Generation and Identification of Lines Which Segregate for Lethal Mutations

[0277] Wild-type Arabidopsis plants of ecotype C24 were transformed by means of a modified “in planta” transformation protocol (Bechthold et al., 1992; Clough and Bent, 1998), and transgenic F₁ plants were selected by means of antibiotic or herbicide resistances (inter alia Clearfield). T₂ seeds of these lines were placed on sterile medium and on compost and, after 7 days' growth under standard conditions, inspected visually for the occurrence of dying seedlings. Features which were observed in particular were changes in pigmentation down to its complete absence, and morphological anomalies. Only those lines for which a segregation ratio of approx. 2:1-3:1, that is to say twice to three times the amount of resistant plants to sensitive plants, was determined in a parallel study were studied further. This ratio indicates a single integration site which causes the resistance.

[0278] Various lines which segregate for a lethal mutation were found. The molecular-biological analyses were carried out as described for Examples 1 to 4. From Example 7, the SEQ ID NO. which describes each of the mutated sequences for the respective lines is stated.

### Example 1

### Identification and Analysis of Line P9, Which Segregates for a Lethal Mutation

[0279] Line 9 (see SEQ ID NO: 3) was identified as described above as a line which segregates for a mutation which is lethal for the seedling. The accurate determination of the segregation revealed that 25% of the progeny showed the albino phenotype, 25% of the progeny sensitivity to the selection and 50% of the progeny resistance to the selection. This segregation ratio is expected when exclusively the homozygously-resistant seedlings are homozygous for the mutation and thus show the recessive phenotype, which is why the T-DNA insertion is coupled very closely to the lethal mutation. The coupling was furthermore checked in a cosegregation analysis. To this end, the progeny of 34 resistant wild-type plants of line P9 was analyzed. Again, albinos were found in the progeny in all cases. This fact allows the conclusion that the resistance-mediating T-DNA insertion and the mutation are always inherited together and therefore coincide (with a high degree of probability). Thereupon, the line was studied in terms of molecular biology in order to accurately determine the site of the T-DNA integration. To this end, the genomic DNA was isolated from approximately 50 mg of tissue of these plants using standard products and methods (columns from Qiagen, Hilden, Germany, or Phytopure kit from Amersham Pharmacia, Freiburg, Germany) and studied for integrity and quantity by separation by means of gel electrophoresis. The amplification of the genomic sequences adjacent to the T-DNA was carried out by means of a modified adaptor PCR protocol (Spertini et al., 1999). For each combined restriction and adaptor ligation, approximately 50 to 100 ng of the DNA were cleaved with the restriction enzymes BglII, MunI, Spel, PspI406I/BspI991, AflII and the adaptor consisting of the annealed oligos 5′CTAATACGACTCACTATAGGGCTCGAGCGGCCGGGCAGGT-3′ and 5′NN₍₂₋₄₎ACCTGCCCAA-3′, where 5′NN₍₂₋₄₎ represent the overhang matching the enzyme in question. One μl of this genomic DNA provided with adaptors was employed for an amplification of the sequences flanking the T-DNAs, using an adaptor-specific primer (5′GGATCCTAATACGACTCACTATAGGGC-3′) and a gene-specific primer (LB1: 5′TGACGCCATTTCGCCTTTTCA-3′ for the left border and RB 1: 5′CAACTTAATCGCCTTGCAGCACA-3′ for the right border). The PCR was carried out under standard conditions for 7 cycles at an annealing temperature of 72° C. and for 32 cycles at an annealing temperature of 65° C. in a reaction volume of 25 μl. The amplificate obtained was diluted 1:50 in H₂O, and one μl of this dilution was employed for a second round of amplification (5 cycles at an annealing temperature of 67° C. and 28 cycles at an annealing temperature of 60° C., otherwise standard PCR conditions). To this end, “nested” primers, i.e. primers which are positioned further inside on the PCR product (5′-TATAGGGCTCGAGCGGC-3′ for the adaptor, LB2: 5′CAGAAATGGATAAATAGCCTTGCTTCC-3′ for the left border and RH2: 5′AGCTGGCGTAATAGCGAAGAG-3′ for the right border) were employed, thus increasing the specificity and selectivity of the amplification. An aliquot of the amplificate, which was obtained in a reaction volume of 50 μl, was subjected to analysis by gel electrophoresis. For line P9, a 1350 bp fragment was identified for the left T-DNA border and a 750 bp fragment for the right border for the enzyme combination Psp14O6I/BspII9I. The products were sequenced by means of the primers RBseq and Lbseq (5′CAATACATTACACTAGCATCTG-3′). Both products identified the identical region in the Arabidopsis genome. The successful identification was verified by a PCR reaction with a primer specific for the derived flanking sequence and a primer specific for the T-DNA, RB1. Obtaining the PCR product of the predicted size which is specific for this line confirmed the successful identification of the insertion site of the T-DNA. BLAST analysis of the isolated sequences (BLASTN, Altschul et al., 1990) J Mol. Biol. 215:403-410) demonstrated the insertion of the left border in position 53498 and of the right border in position 54283 of clone MVII1 of chromosome III (EMBL|AP000419). An ORF (MVI11.13) which encodes a “DNA repair protein RAD-54-like” protein is annotated in this region. This ORF, which is interrupted by the insertion, shows a high degree of homology with the yeast DNA repair protein RHP54 (Muris et al., J. Cell. Sei., 1996) and similarities with a series of other DNA-binding proteins.

### Example 2

### Identification and Analysis of Line P38, Which Segregates for a Lethal Mutation

[0280] Line P38 was identified as described above as a line which segregates for a mutation which is lethal to the seedling. The accurate determination of the segregation revealed that 25% of the progeny showed the albino phenotype, 25% of the progeny sensitivity to the selection and 50% of the progeny resistance to the selection. This segregation ratio is expected when exclusively the homozygously-resistant seedlings show the phenotype and the T-DNA insertion is therefore coupled very closely to the lethal mutation. The coupling is to be tested further using cosegregation analysis. To this end, the progeny of 34 resistant wild-type plants of line P38 was analyzed. Again, albinos were found in the progeny in all cases. This fact allows the conclusion that the resistance-mediating T-DNA insertion and the mutation are always inherited together and therefore coincide (with a high degree of probability). The molecular-biological analysis was carried out as described in Example 1. For line P38, a 350 bp fragment was identified for the left T-DNA border in the case of the enzyme MunI. The product was sequenced by means of the primer Lbseq and showed the expected identity with a region of the Arabidopsis genome. The successful identification was verified by a PCR reaction with a primer specific for the derived flanking sequence and a primer specific for the T-DNA, LB1. Obtaining the PCR product of the predicted size which is specific for this line confirmed the successful identification of the insertion site of the T-DNA. BLAST analysis of the isolated sequence (BLASTN, Altschul et al., 1990, J Mol. Biol. 215:403-410) demonstrated the insertion of the T-DNA in position 42163 of the BAC clone F3E22 of chromosome III (EMBLNEW|AC023912). According to the annotation of this region, integration took place into a predicted ORF (F3E22.13), which showed significant similarity with various thioredoxins. Then, primers were synthesized for the predicted 5′ and 3′ end and employed for a standard PCR with Arabidopsis cDNA. The mRNA was isolated from the seedlings by means of oligo-dT Dynabeads from Dynal, and the cDNA was generated therefrom using a cDNA synthesis kit from Gibco-BRL and an oligo dT primer. The PCR product obtained was ligated into a TA vector (pCRScriptII, Invitrogen) and sequenced. The sequence showed complete agreement with the predicted sequence and gene structure for this ORF. Accordingly, the inventors herewith document for the first time the experimental confirmation of the existence of this ORF in the predicted structure.

### Example 3

### Identification and Analysis of Line P44, Which Segregates for a Lethal Mutation

[0281] Line P44 was identified as described above as a line which segregates for a mutation which is lethal to the seedling. The accurate determination of the segregation revealed that 25% of the progeny showed the albino phenotype, 25% of the progeny sensitivity to the selection and 50% of the progeny resistance to the selection. This segregation ratio is expected when exclusively the homozygously-resistant seedlings show the phenotype and the T-DNA insertion is therefore coupled very closely to the lethal mutation. The coupling was furthermore tested in a cosegregation analysis. To this end, the progeny of 34 resistant wild-type plants of line P44 was analyzed. Again, albinos were found in the progeny in all cases. This fact allows the conclusion that the resistance-mediating T-DNA insertion and the mutation are always inherited together and therefore coincide (with a high degree of probability). The molecular-biological analysis was carried out as described in Example 1. For line P44, a 350 bp fragment was identified for the enzyme MunI and a 500 bp fragment for the enzyme BglII, in each case for the left T-DNA border. These products were sequenced by means of the primer Lbseq and defined the identical position in the Arabidopsis genome. The successful identification was verified by a PCR reaction with a primer specific for the derived flanking sequence and a primer specific for the T-DNA, LB1. Obtaining the PCR product of the predicted size which is specific for this line confirmed the successful identification of the insertion site of the T-DNA. BLAST analysis of the isolated sequence (BLASTN, Altschul et al., 1990, J Mol. Biol. 215:403-410) demonstrated the insertion of the T-DNA in position 66762 of the TAC clone K15C23 (EMBLALERT|AB024024). According to the annotation of this region, integration took place in a predicted ORF (K15C23.10), whose derived amino acid sequence shows no significant homologies. In contrast, weak homologies are found with mouse (Accession Q60992) and human (Accession: P52735) VAV2 proteins. Then, primers were synthesized for the predicted 5′ and 3′ end of the ORF and employed for a standard PCR with Arabidopsis cDNA. cDNA was generated as described in Example 3. The sequence showed complete agreement with the predicted sequence and gene structure for this ORF. Accordingly, the inventors herewith document for the first time the experimental confirmation of the existence of this ORF in the predicted structure.

### Example 4

### Identification and Analysis of Line P77, Which Segregates for a Lethal Mutation

[0282] Line P77 was identified as described above as a line which segregates for a mutation which is lethal to the seedling. The accurate determination of the segregation revealed that 25% of the progeny showed the albino phenotype, 25% of the progeny sensitivity to the selection and 50% of the progeny resistance to the selection. This segregation ratio is expected when exclusively the homozygously-resistant seedlings show the phenotype and the T-DNA insertion is therefore coupled very closely to the lethal mutation. The coupling was furthermore tested in a cosegregation analysis. To this end, the progeny of 34 resistant wild-type plants of line P77 was analyzed. Again, albinos were found in the progeny in all cases. This fact allows the conclusion that the resistance-mediating T-DNA insertion and the mutation are always inherited together and therefore coincide (with a high degree of probability). The molecular-biological analysis was carried out as described in Example 1. For line P77, a 650 bp fragment was identified for the left T-DNA border for the enzyme combination Psp14061/Bsp1191. The products were sequenced by means of the primer Lbseq. The successful identification was verified by a PCR reaction with a primer specific for the derived flanking sequence and a primer specific for the T-DNA, LB1. Obtaining the PCR product of the predicted size which is specific for this line confirmed the successful identification of the insertion site of the T-DNA. BLAST analysis of the isolated sequence (BLASTN, Altschul et al., 1990, J Mol. Biol. 215:403-410) showed an absolute agreement of the sequence with a segment on the Arabidopsis chromosome III and demonstrated the insertion of the T-DNA in position 13436 of the BAC clone F24B22 (EMBLATF24B22) and interrupts a predicted open reading frame (F24B22.50) which encodes a protein with a high degree of similarity with various fructokinases, for example from potato (Solanum tuberosum, Accession: P37829) or from the bacterium Vibrio alginolyticus (Accession: P22824). Then, primers were synthesized for the predicted 5′ and 3′ end of the ORFs and employed for a standard PCR with Arabidopsis cDNA. cDNA was generated as described in Example 3. The sequence showed complete agreement with the predicted sequence and gene structure for this ORF. Accordingly, the inventors herewith document for the first time the experimental confirmation of the existence of this ORF in the predicted structure.

### Example 5

### Identification and Analysis of Lines P95, P98, P99b, P102 and P103, Which Segregate for a Lethal Mutation

[0283] Analogously to the abovementioned Examples 1 to 4, clones P95, P98, P99b, P102 and P103 were identified as lines which segregate for mutations which are lethal for the seedling. The molecular-biological procedures or analyses were carried out as described in Examples 1 to 4.

[0284] In line P95, the T-DNA is inserted in position 35442 of BACT5L19 (Accession number AL049481) of the Arabidopsis chromosome IV. In line P98, the T-DNA was inserted in position 54861 of the P1 clone MVA3 (Accession number: AB006706) of chromosome V. In line P99b, the insertion of the T-DNA was found to be in position 66042 of the BAC F10M10 (AL035521) on chromosome IV. In clone P102, the insertion of the T-DNA was found to be on chromosome IV in the region of the contig fragment 69 in position 46342-46355 (AL 161573). Line P103 showed an insertion of the T-DNA in position 57314 of the BAC F11F8 (AC016661) of chromosome I.

### Example 6

### Identification and Analysis of Lines P91 and P99a, Which Segregate for a Lethal Mutation

[0285] Analogously to the abovementioned examples, clones P91 and P99a were identified as lines which segregate for mutations which are lethal for the seedling. The molecular-biological analyses were carried out as described for Examples 1 to 4.

### Example 7

[0286] Line A300364 (Seq ID No.: 26 [nucleic acid] and 27 [protein]) was identified analogously to the abovementioned examples. Line A300364 segregates for an embryo-lethal mutation. A 2:1 segregation was observed. When 35 lines were studied, an absolute cosegregation was observed between the T-DNA and the mutation which leads to the albino phenotype. In these lines, the T-DNA is inserted in position 39517 of chromosome II (EMBL|AC004238). In this position, the insertion interrupts, and thus inactivates, an ORF (At2g34860) which encodes an unknown protein (AAC12826.1). In Blastp comparisons with standard settings, the protein shows homology over a region of 40 amino acids with various DNAJ chaperone proteins (heat-shock protein 40) or the DNAJ protein (Q9UXR9) from Methanosarcina thermophila (Hoffmann-Bang et al., Gene 238 (2), 387-395 (1999)).

### Example 8

[0287] Line A301034 (Seq ID No.: 28 [nucleic acid] and 29 [protein]) was identified analogously to the abovementioned examples. Line A301034 segregates for an embryo-lethal mutation. A 2:1 segregation was observed. When 35 lines were studied, an absolute cosegregation was observed between the T-DNA and the mutation which leads to the albino phenotype. The T-DNA is inserted on chromosome V in position 25928 of the BAC T21H19 (EMBL|ATT21H19). In this position, the insertion interrupts a gene (T21H19_{—}100) which encodes a putative protein (CAC01859.1). This shows homology with other putatitve Arabidopsis proteins. The derived protein sequence shows marked homologies with the maize CRS1 gene product (AAG00595), which is required for splicing the group II intron of the chloroplast gene atpF. Seq ID No.: 43 shows the genomic sequence of line A301034 from the start codon to the stop codon, including introns.

[0288] The activity can be tested, for example, in assays as they are described in Bock, Nucleic Acids Res., 1995, 23, 2544-7.

### Example 9

[0289] Line A300377 (Seq ID No.: 30 [nucleic acid] and 31 [protein]) was identified analogously to the abovementioned examples. Line A300377 segregates for an embryo-lethal mutation. A 2:1 segregation was observed. When 35 lines were studied, an absolute cosegregation was observed between the T-DNA and the mutation which leads to the albino phenotype. The T-DNA is inserted in position 14509 of the P1 clone MRN17 (AB005243) and thus very likely in the 3′-untranslated region of an alanyl-tRNA synthetase (BAB10601.1).

### Example 10

[0290] Line A300841 (Seq ID No.: 32 [nucleic acid] and 33 [protein]) was identified analogously to the abovementioned examples as being essential. Line A300841 segregates for an embryo-lethal mutation. A 2:1 segregation was observed. When 35 lines were studied, an absolute cosegregation was observed between the T-DNA and the mutation which leads to the albino phenotype. In this line, the T-DNA is inserted in position 3183 of the BAC T14P8, which corresponds to position 143432 in the contig fragment 6 of chromosome IV. Owing to the insertion in this position, an open reading frame for a putatitive chloroplast outer envelope 86-like protein is destroyed. ESTs for this ORF (CAB80744.1) already exist in databases (EST gb:AI998804.1, R90258, AA651438). The protein encoded shows a high degree of homology with the chloroplast outer envelope 86 protein OEP86 from pea, P. sativum, GenBank Accession Number Z31581 and has an ATP/GTP binding motif (P-loop).

[0291] The activity of an OEP86 can be tested in assays, for example as described or cited in Muckel, J. Biol. Chem., 1996, 271, 23846-52, Young, Plant Physiol., 1999, 121, 237-44 or in the review Keegstra, Curr. Opin. Plant Biol., 1999, 2, 471-6.k

### Example 11

[0292] Line 2266c (Seq ID No.: 34 [nucleic acid] and 35 [protein]) was identified analogously to the abovementioned examples. Line 2266c segregates for an embryo-lethal mutation. A 2:1 segregation was observed. The T-DNA is inserted in position 26501 of the BAC F6N18 (AC017118) of chromosome I. In this position, the insertion interrupts an ORF whose derived amino acid sequence (AAF25967.1) shows marked similarity to an Arabidopsis FMRF amide propeptide isolog (gi|1871179).

### Example 12

[0293] Line P61 (Seq ID No.: 36 [nucleic acid] and 37 [protein]) was identified analogously to the abovementioned examples. Line P61 segregates for an embryo-lethal mutation. A 2:1 segregation was observed. When 35 lines were studied, an absolute cosegregation was observed between the T-DNA and the mutation which leads to the albino phenotype. The T-DNA is inserted in position 28640 of the BAC F4B12 (EMBLNEW|AP001299) on chromosome III. The insertion prevents the expression of an ORF which starts in position 28705 and which encodes an unknown protein (BAB02572.1) with a low degree of homology with proteosomal protein 26S PROTEASOME SUBUNIT S5B, (Deveraux, Q., Jensen, C. and Rechsteiner, M., Molecular cloning and expression of a 26 S protease subunit enriched in dileucine repeats, J. Biol. Chem. 270 (40), 23726-23729 (1995)).

### Example 13

[0294] Line A300857 (Seq ID No.: 38 [nucleic acid] and 39 [protein]) was identified analogously to the abovementioned examples. Line A300857 segregates for an embryo-lethal mutation. When 35 lines were studied, an absolute cosegregation was observed between the T-DNA and the mutation which leads to the albino phenotype. In this line, the T-DNA is inserted in position 51122 of the BAC T10024 of chromosome I (EMBL:AC007067). In this position, the insertion interrupts, and thus inactivates, an ORF (T10O24.14) which encodes an unknown protein (AAD39574.1). Seq. ID. No. 42 shows the corresponding genomic sequence.

### Example 14

[0295] Line A300367 (Seq ID No.: 40 [nucleic acid] and 41 [protein]) was identified analogously to the abovementioned examples. Line A300367 segregates for an embryo-lethal mutation. When 35 lines were studied, an absolute cosegregation was observed between the T-DNA and the mutation which leads to the albino phenotype. In this line, the T-DNA is inserted in position 31058 “contig fragments” 86 (EMBL:ATCHRIV86) of chromosome IV. Owing to the insertion of few base pairs upstream of the start codon (51073) of a geranylgeranyl-pyrophosphate synthase (Bartley and Scolnik, 1994) (Plant Physiol. 104, 1469-1470, 1994), Accession L25813, it is highly probable that the functionality of the gene is destroyed by interfering with transcription, transcript stability or at least translation. Thus, Okada, Plant Physiol., 2000, 122, 1045-56, describes five different GGPPs in Arabidopsis which are localized in three different compartments. Surprisingly, the protein or transcript, probably a GGPP, shown herein is essential.

[0296] The activity of a geranylgeranyl-pyrophosphate synthase can be tested in test systems, for example as described in Zhu et al., Plant Cell Physiol., 1997, 38, 337-61, or Okada, Plant Physiol., 2000, 122, 1045-56.

### Example 15

[0297] Line 305735 (SEQ ID NO: 44 [nucleic acid] and SEQ ID NO: 45 [protein encoded by the above nucleic acid]) was identified analogously to the abovementioned examples. Line 305735 segregates for an albino-lethal mutation, which cosegregates with the resistance marker and thus with the T-DNA. The T-DNA is integrated in position 46571 of the sequence ATCHRIV69, Accession number AL161573. The insertion of this position interrupts the ORF AT4g28590, which encodes a hypothetical protein which has a “cecropin” family signature (AA237-245).

### Example 16

[0298] Line 303726 (SEQ ID NO: 46 [nucleic acid] and SEQ ID NO: 47 [protein encoded by the above nucleic acid]) was identified analogously to the abovementioned examples. Line 303726 segregates for an albino-lethal mutation which cosegregates with the resistance marker and thus with the T-DNA. The T-DNA is inserted in position 51568 of the BAC AC004669 on chromsome 2. Owing to the insertion at this position, it is highly probable that the transcription and thus the function of the ORF At2g30950 is prevented or adversely affected. This ORF encodes a putative ftsH chloroplast protease.

### Example 17

[0299] Line 304249 (SEQ ID NO: 48 [nucleic acid] and SEQ ID NO: 49 [protein encoded by the above nucleic acid]) was identified analogously to the abovementioned examples. Line 304249 segregates for an albino-lethal mutation which cosegregates with the resistance marker and thus with the T-DNA. The T-DNA is inserted in position 13004 of the BAC ATF19B15, Accession number AL078470 destroys the ORF F19B15.40 which encodes the Arabidopsis “AIM1” protein (CAB43915.1). A plurality of ESTs, GB:Z31666, gb:Z33957, Z31666, have already been described for this ORF. This protein is a peroxysomal tetrafunctional enzyme of the fatty acid metabolism.

### Example 18

[0300] Line 304264 (SEQ ID NO: 50 [nucleic acid] and SEQ ID NO: 51 [protein encoded by the above nucleic acid]) was identified analogously to the abovementioned examples. Line 304264 segregates for an albino-lethal mutation, which cosegregates with the resistance marker and thus with the T-DNA. The T-DNA is inserted in position 63762 of the BAC AB020742. The insertion site is located approximately 240 base pairs upstream of the start codon for an ORF K21H1.19, which encodes a UDP-glucuronyl transferase-like protein. Owing to the insertion of the T-DNA in this position, it is highly probable that the transcription is modified or prevented and the function of the gene thus destroyed.

### Example 19

[0301] Line 304485 (SEQ ID NO: 52 [nucleic acid] and SEQ ID NO: 53 [protein encoded by the above nucleic acid]) was identified analogously to the abovementioned examples. Line 304485 segregates for an albino-lethal mutation, which cosegregates with the resistance marker and thus with the T-DNA. The T-DNA is inserted in position 25034 of the BAC AC006438 on chromosome 2. Owing to the integration at this site, the T-DNA destroys the ORF At2g15820 which encodes an unknown protein.

### Example 20

[0302] Line 304652 (SEQ ID NO: 54 [nucleic acid) and SEQ ID NO: 55 [protein encoded by the above nucleic acid]) and SEQ ID NO: 56 [nucleic acid] and SEQ ID NO: 57 [protein encoded by the above nucleic acid] was identified analogously to the abovementioned examples. Line 304652 segregates for an albino-lethal mutation, which cosegregates with the resistance marker and thus with the T-DNA. The T-DNA is inserted in position 6309 of the BAC ATF12B17, Accession AL353995, on chromosome 5. Two different open reading frames are annotated for the adjacent region. Owing to the integration of approx. 382 base pairs upstream of the ORFs ATF12B17_{—}20 and ATF12B17_{—}10, it is highly probable that the transcription and the functionality of the genes, which encode an FPF1-like (flowering promoting factor 1) protein (ATF12B17_{—}20, SEQ ID NO: 54 and SEQ ID NO: 55) and a protein (ATF12B17_{—}10, SEQ ID NO: 56 and SEQ ID NO: 57) with similarity to the Homo sapiens KIAA1038 protein, is disrupted or prevented.

### Example 21

[0303] Line 304656 (SEQ ID NO: 58 [nucleic acid] and SEQ ID NO: 59 [protein encoded by the above nucleic acid]) was identified analogously to the abovementioned examples. Line 304656 segregates for an albino-lethal mutation, which cosegregates with the resistance marker and thus with the T-DNA. The T-DNA is inserted in position 35169 of the BAC F24P17 (Accession AC011623) on chromosome 3. In this position, the insertion interrupts, and thus destroys, an ORF 24P17.10, which encodes an unknown protein. The blastp alignment with standard settings reveals pronounced homologies with a nodulin/glutamate-ammonia-ligase-like protein.

### Example 22

[0304] Line 302192 (SEQ ID NO: 60 [nucleic acid] and SEQ ID NO: 61 [protein encoded by the above nucleic acid]) was identified analogously to the abovementioned examples. Line 302192 segregates for an albino-lethal mutation, which cosegregates with the resistance marker and thus with the T-DNA. The T-DNA is inserted in position 43178 of the BAC AB022211 on chromosome 5. Owing to the integration of approx. 454 base pairs upstream of the ORF K1L20.13, it is highly probable that the transcription, and the thus the function, of the gene which encodes an SHI-like zinc finger protein (short internodes) is disrupted or prevented.

### Example 23

[0305] Line 302636 (SEQ ID NO: 62 [nucleic acid] and SEQ ID NO: 63 [protein encoded by the above nucleic acid]) was identified analogously to the abovementioned examples. Line 302636 segregates for an albino-lethal mutation, which cosegregates with the resistance marker and thus with the T-DNA. The T-DNA is inserted in position 141376 of the BAC ATF4P12 (Accession: AL132966) on chromosome 3. The integration of the T-DNA at this position interrupts, and thus inactivates, the ORF F4P12_{—}400, which encodes a protein with similarity to crp1 from Zea mays, PIR:T01685. Moreover, this ORF contains the ESTs gb:AI999771.1, T45254, AA713158″.

### Example 24

[0306] Line 302894 (SEQ ID NO: 64 [nucleic acid] and SEQ ID NO: 65 [protein encoded by the above nucleic acid]) was identified analogously to the abovementioned examples. Line 302894 segregates for an albino-lethal mutation, which cosegregates with the resistance marker and thus with the T-DNA. The T-DNA is inserted in position 23970 of the BAC ATT21H19 (Accession: AL391148) on chromosome 5. The insertion of the T-DNA at this position interrupts an ORF (T21H19_{—}100), which encodes a putative protein with similarities with hypothetical proteins from Arabidopsis. Moroever, the blastp analysis reveals a pronounced homology with CRS1 from Zea mays Accession AAG00595, which is a group II intron splicing factor (Till,B et al., RNA 7 (9), 1227-1238 (2001)).

### Example 25

[0307] Line 305146 (SEQ ID NO: 66 [nucleic acid] and SEQ ID NO: 67 [protein encoded by the above nucleic acid]) was identified analogously to the abovementioned examples. Line 305146 segregates for an albino-lethal mutation, which cosegregates with the resistance marker and thus with the T-DNA. The T-DNA is inserted in position 65706 of the P1 clone MOP9 (Accession: AB006701) on chromosome 5. The insertion of the T-DNA at this position interrupts the ORF of the gene At5g24315, which encodes an unknown protein.

### Example 26

[0308] Acc.: AL163816 Name: ATT20O10

[0309] Line 305156 (SEQ ID NO: 68 [nucleic acid] and SEQ ID NO: 69 [protein encoded by the above nucleic acid]) was identified analogously to the abovementioned examples. Line 305156 segregates for an albino-lethal mutation, which cosegregates with the resistance marker and thus with the T-DNA. The T-DNA is inserted in position 898 of the BAC ATT20O10 MOP9 (Accession: AL163816) on chromosome 3. The insertion of the T-DNA at this position interrupts an ORF (T20O10_{—}10), which encodes a protein with a high degree of similarity to the Synechocystis translation releasing factor RF-1 (PIR:S76914). The derived amino acid sequence contains a prokaryotic type class I peptide chain detachment factor motif, AA280-296.

### Example 27

[0310] Line 304044 (SEQ ID NO: 70 [nucleic acid] and SEQ ID NO: 71 [protein encoded by the above nucleic acid]) was identified analogously to the abovementioned examples. Line 304044 segregates for an albino-lethal mutation, which cosegregates with the resistance marker and thus with the T-DNA. The T-DNA is inserted in position 44121 of the BAC ATAP22 MOP9 (Accession: Z99708) on chromosome 4. The insertion of the T-DNA at this position interrupts an ORF (C7A10.610), which encodes a protein with a high degree of similarity with an allergen (“minor allergen”) from Alternaria alternata (PIR2:S43111). Moreover, the ESTs gb:R64949, AA651052 have already been found for this ORF.

[0311] Acc.: Z99708 Name: ATAP22

### Example 28

[0312] Line 140412 (SEQ ID NO: 72 [nucleic acid] and SEQ ID NO: 73 [protein encoded by the above nucleic acid]) was identified analogously to the abovementioned examples. Line 140412 segregates for an albino-lethal mutation, which cosegregates with the resistance marker and thus with the T-DNA. The T-DNA is inserted in position 68520 of the sequence AC006264 on chromosome 2. The insertion of the T-DNA interrupts the 3′UTR of the gene At2g21160, and it is therefore highly probable that the function of the ORF is prevented owing to the destabilization of the transcript. The ORF At2g21160 encodes the alpha-subunit of a putative signal sequence receptor.

[0313] Acc: AC006264 Name: AC006264

### Example 29

[0314] Line 159012 (SEQ ID NO: 74 (nucleic acid] and SEQ ID NO: 75 [protein encoded by the above nucleic acid]) was identified analogously to the abovementioned examples. Line 159012 segregates for an albino-lethal mutation, which cosegregates with the resistance marker and thus with the T-DNA. The T-DNA is inserted in position 127261 of the sequence ATCHRIV3 (fragment No. 3), Accession AL161491 on chromosome 4. The insertion of the T-DNA interrupts the ORF AT4g01220, which contains the ESTs gb:AA597894, AA597304 and encodes unknown protein.

[0315] Acc: AL161491 Name: ATCHRIV3 (fragment No. 3)

### Example 30

[0316] Line 106037 (SEQ ID NO: 76 [nucleic acid] and SEQ ID NO: 77 [protein encoded by the above nucleic acid]) was identified analogously to the abovementioned examples. Line 106037 segregates for an albino-lethal mutation, which cosegregates with the resistance marker and thus with the T-DNA. The T-DNA is inserted in position 50359 of the sequence AC006193 on chromosome 1. The insertion of the T-DNA in this position interrupts the ORF F13O11.11, which encodes an unknown protein. The Blastp analysis with standard settings reveals a similarity with oxidoreductases.

[0317] Acc: AC006193 Name: AC006193

### Example 31

[0318] Line 126905 (SEQ ID NO: 78 [nucleic acid] and SEQ ID NO: 79 [protein encoded by the above nucleic acid]) was identified analogously to the abovementioned examples. Line 126905 segregates for an embryo-lethal mutation, which cosegregates with the resistance marker and thus with the T-DNA. The T-DNA is inserted in position 71928 of the BAC ATF25L23, Accession AL356014, on chromosome 3. The insertion of the T-DNA in this position interrupts the ORF F25L23_{—}240″, which encodes a farnesyl transferase subunit A.

[0319] Acc.: AL356014 Name: ATF25L23

### Example 32

[0320] Line 127458 (SEQ ID NO: 80 [nucleic acid] und SEQ ID NO: 81 [protein encoded by the above nucleic acid]) was identified analogously to the abovementioned examples. Line 127458 segregates for an embryo-lethal mutation, which cosegregates with the resistance marker and thus with the T-DNA. The T-DNA is inserted in position 45352 of the BACs T19K24, Accession AC002342, on chromosome 5. The insertion of the T-DNA in this position interrupts the ORF T19K24.18, which encodes the ATP-independent copper transporter RAN1.

[0321] Acc.: AC002342 Name: ATAC002342

### Example 33

[0322] Line 304249b (SEQ ID NO: 82 [nucleic acid] and SEQ ID NO: 83 [protein encoded by the above nucleic acid]) was identified analogously to the abovementioned examples. Line 304249b segregates for an albino-lethal mutation, which cosegregates with the resistance marker and thus with the T-DNA. The insertion in position 17105 of the BAC ATF19B15, Accession AL078470, destoys the ORF F19B15.50, which shows similarities with glycine-rich proteins and contains the ESTs gb:Z29181, T42831, Z34138, Z33797, Z30844.

### Example 34

[0323] Line 304264b (SEQ ID NO: 84 [nucleic acid] and SEQ ID NO: 85 [protein encoded by the above nucleic acid]) was identified analogously to the abovementioned examples. Line 304264b segregates for an albino-lethal mutation, which cosegregates with the resistance marker and thus with the T-DNA. The T-DNA is inserted in position 63762 of the BAC AB020742. The incorporation site is located approximately 340 base pairs upstream of the start codon for an ORF K21H1.18, which has similarity with unknown proteins.

### Example 35

[0324] Line 192813 (SEQ ID NO: 86 [nucleic acid] and SEQ ID NO: 87 [protein encoded by the above nucleic acid]) was identified analogously to the abovementioned examples. Line 192813 segregates for an albino-lethal mutation, which cosegregates with the resistance marker and thus with the T-DNA. The T-DNA is inserted on chromosome 1 in position 9869 of the BAC F3O9, Accession AC006341. Owing to the insertion of approx. 323 bp upstream of the start codon for an ORF, F3O9.4, for which a plurality of ESTs have already been identified (gb|F15498, gb|H37515, gb|T41906, gb|T22448, gb|W43356, gb|T20739), it is highly probable that the transcription and thus the function of the gene for this ORF are inhibited. The ORF encodes a protein for which the blastp alignment with standard setting reveals high degrees of homology with a variety of syntaxins and syntaxin-like proteins, also those from plants.

### Example 36

[0325] Line 203521 (SEQ ID NO: 88 [nucleic acid] and SEQ ID NO: 89 [protein encoded by the above nucleic acid]) was identified analogously to the abovementioned examples. Line 203521 segregates for an albino-lethal mutation, which cosegregates with the resistance marker and thus with the T-DNA. The T-DNA is inserted on chromosome 2, section 179 of 255 Accession AC006533. Owing to the insertion, the ORF AT2g31830, which encodes a putative inositol-polyphosphate 5′-phosphatase, is destroyed.

### Example 37

[0326] Line 206462 (SEQ ID NO: 90 [nucleic acid] and SEQ ID NO: 91 [protein encoded by the above nucleic acid]) was identified analogously to the abovementioned examples. Line 206462 segregates for an albino-lethal mutation, which cosegregates with the resistance marker and thus with the T-DNA. The T-DNA is inserted on chromosome 1 in position 53577-53600 of the BAC F24D7, Accession AC011622. Owing to the insertion at this position, the ORF F24D7.13, which encodes a putative UDP—N-acetylmuramoylalanyl-D-glutamate 2,6-diaminopimelate ligase (murE), is destroyed.

### Example 38

[0327] Line 216642 (SEQ ID NO: 92 [nucleic acid] and SEQ ID NO: 93 [protein encoded by the above nucleic acid]) was identified analogously to the abovementioned examples. Line 216642 segregates for an albino-lethal mutation, which cosegregates with the resistance marker and thus with the T-DNA. The T-DNA is inserted on chromosome 3 in position 18529 of the P1 clone MRC8, Accession AB020749. Owing to the insertion at this position, the ORF MRC8.5, which encodes a beta-glucosidase, is destroyed.

### Beispiel 39

[0328] Line 219902 (SEQ ID NO: 94 [nucleic acid] and SEQ ID NO: 95 [protein encoded by the above nucleic acid]) was identified analogously to the abovementioned examples. Line 219902 segregates for an albino-lethal mutation, which cosegregates with the resistance marker and thus with the T-DNA. The T-DNA is inserted on chromosome 1 in position 7740 of the BAC F15M4, Accession AC012394. Owing to the insertion at this position, the ORF F15M4.1, which encodes a hydroxymethylglutaryl-CoA reductase, is destroyed.

### Example 40

[0329] Line 220801 (SEQ ID NO: 96 [nucleic acid] and SEQ ID NO: 97 [protein encoded by the above nucleic acid]) was identified analogously to the abovementioned examples. Line 220801 segregates for an albino-lethal mutation, which cosegregates with the resistance marker and thus with the T-DNA. The T-DNA is inserted on chromosome 5 in position 15447-15472 of the P1 clone MRN17, Accession AB005243. Owing to this insertion approx. 580 bp upstream of the start codon, it is probable that at least the transciption and thus the function of the ORF MRN17.4 is destroyed. This ORF encodes a GDSL-motif-lipase/hydrolase-like protein.

### Example 41

[0330] Line 224933 (SEQ ID NO: 98 [nucleic acid] and SEQ ID NO: 99 [protein encoded by the above nucleic acid]) was identified analogously to the abovementioned examples. Line 224933 segregates for an albino-lethal mutation, which cosegregates with the resistance marker and thus with the T-DNA. The T-DNA is inserted on chromosome 4, ESSA I FCA Contig-Fragment No. 3., Accession Z97338, in position 107932-107997. Owing to this insertion, the functionality of the ORF d13705c, which encodes a cellulose-synthase-like protein, is destroyed.

### Example 42

[0331] Line 229091 (SEQ ID NO: 100 [nucleic acid] and SEQ ID NO: 101 [protein encoded by the above nucleic acid]) was identified analogously to the abovementioned examples. Line 229091 segregates for an albino-lethal mutation, which cosegregates with the resistance marker and thus with the T-DNA. The T-DNA is inserted on chromosome 5, TAC clone:K5J14, Accession AB023032, in position 55778. Owing to the insertion at this position, the functionality of the ORF K5J14.11, which encodes a maize-crp1-protein-like protein, is destroyed.

### Example 43

[0332] Line 246473 (SEQ ID NO: 102 [nucleic acid] and SEQ ID NO: 103 [protein encoded by the above nucleic acid]) was identified analogously to the abovementioned examples. Line 246473 segregates for an albino-lethal mutation, which cosegregates with the resistance marker and thus with the T-DNA. The T-DNA is inserted on chromosome 1, BAC F4F7, Accession AC079374, in position 17376. Owing to the insertion at this position, approx. 7 bp downstream of the ORF F4F7.26, it is highly probable that the transcription, or transcript stability, and thus the functionality of this open reading frame is destroyed. This ORF enclodes a putative t-RNA glutamine synthetase and has homology in particular with the Lupinus luteus tRNA glutamine synthetase GI:2995454.

### Example 44

[0333] Line 304139 (SEQ ID NO: 104 [nucleic acid] and SEQ ID NO: 105 [protein encoded by the above nucleic acid]) was identified analogously to the abovementioned examples. Line 304139 segregates for an albino-lethal mutation, which cosegregates with the resistance marker and thus with the T-DNA. The T-DNA is inserted on chromosome 5, P1 clone MFB 13, Accession AB010073, in position 49311-49335. Owing to the insertion at this position approx. 25 bp downstream of the ORF MFB13.17, it is highly probable that the transcription, or transcript stability, and thus the functionality of this open reading frame, which encodes an exonuclease-like protein, is destroyed.

### Example 45

[0334] Line 304886 (SEQ ID NO: 106 [nucleic acid] and SEQ ID NO: 107 [protein encoded by the above nucleic acid]) was identified analogously to the abovementioned examples. Line 304886 segregates for an albino-lethal mutation, which cosegregates with the resistance marker and thus with the T-DNA. The T-DNA is inserted on chromosome 2, BAC clone F23H14, section 1 of 255, Accession AC006837, in position 84045. Owing to the insertion at this position, the ORF At2g01110 is interrupted and inactivated. This ORF encodes a putative “sec-independent” translocase protein TATC. The sequence is also described in WO 144277.

### Example 46

[0335] Line 306053 (SEQ ID NO: 108 [nucleic acid] and SEQ ID NO: 109 [protein encoded by the above nucleic acid]) was identified analogously to the abovementioned examples. Line 306053 segregates for an albino-lethal mutation, which cosegregates with the resistance marker and thus with the T-DNA. The T-DNA is inserted on chromosome 4, BAC clone F28J12, Accession AL021710, in position 74806-74828. Owing to the insertion at this position, the ORF F28J12.180, which encodes a putative protein, is interrupted and inactivated. blastp analyses with standard setting revealed that the derived amino acid sequence has not only pronounced homologies with a variety of hypothetical and putative proteins, but also a high degree of similarity with selenium-binding-protein-like proteins.

The application's sequence listing, which the Patent Office published only in electronic form, follows.

SEQUENCE LISTING (109 sequences)

SEQ ID NO: 1 - DNA, 2892 bp, Arabidopsis thaliana
  CDS (1)..(2892): Linie P95
atgaagaagaaacaagaagagagttcgttggagaagctaagtacttggtatcaagatggagagcaagacggtggagatagaagtgagaagagaagaatgagtcttaaagcatcagactttgagagtagttctcgaagtggtggaagtaaaagcaaagaagataataagtctgttgttgatgttgagcatcaagatcgtgattccaagagagaaagagatgggagagaacgaacacatggatcttcttctgattcgagtaagaggaagagatgggatgaagcaggtggtcttgttaatgatggtgatcataaaagtagtaagctttctgattctagacatgatagtggtggagaaagagttagtgttagtaatgaacatggtgagagtaggagagatttgaagtctgataggagtttgaagactagtagtagagatgagaagagtaagagtcgtggtgtgaaagatgatgatagaggtagtcctttgaagaaaactagtggtaaggatggttctgaggtagttagagaagtgggtcgatctaataggtcgaaaacaccggatgcggattatgagaaggagaagtatagtcgaaaagatgagaggtctagaggtagggatgatgggtggtctgatagggatagagatcaagaaggtttgaaggataattggaagagaaggcattctagtagtggtgataaagatcagaaagatggggacttgctttatgatcgtggtagggaacgggaatttcctaggcaaggacgtgaaaggagtgaaggagagaggtctcatggtcgtttgggtgggaggaaagatggaaacaggggggaagctgttaaagctttgtccagtggtggcgtttcaaatgagaattatgatgtgattgagatacaaaccaagccacatgattatgtcaggggagaatcaggacccaactttgctcgtatgactgaatctggtcagcaacctcctaaaaaacctagtaataatgaggaagagtgggctcacaaccaggaaggtagacagagaagtgaaacttttggttttgggtcttatggggaagattcgagagatgaagctggtgaagccagttctgattactcaggggctaaagcaagaaaccagagaggttcaacacctggtagaactaattttgtgcaaacccctaatcgtggttatcagactccacaaggcactagagggaacagacccttaaggggtgggaaaggaagacctgccggtggcagagaaaaccaacaaggtgccattccaatgcctatcatggggtcaccatttgcaaaccttggaatgccaccacccagtcccattcattctcttactcctggcatgtcgccaattccgggcacttctgtcacccctgtcttcatgcctccatttgccccaactcttatatggcctggggcccgaggtgttgatggtaatatgctacctgttcctcctgttctttcacctcttcctcccggaccatcaggcccaagatttccttcaatcggcacaccaccaaacccgaatatgttctttactccaccaggttctgatagaggagggcctcctaactttcctgggtccaatatttctggacaaatgggacgtggaatgccatctgataagacttcagggggatgggttcctcctcgaggtggtggacctcctggtaaagctccttctaggggagagcaaaatgactattcccagaactttgtggatactggaatgcggccccagaatttcattcgggagctggagcttaccaatgtggaagactaccccaagcttagagagctcatacagaagaaggatgagattgtatctaattctgcttctgcaccaatgtatctgaaaggcgacttgcatgaagttgagttatctcccgagttatttggaacaaagtttgatgttattcttgttgacccaccatgggaggaatatgtccatagagctcctggtgtttctgatagtatggagtattggacatttgaggacattatcaatctcaagattgaggcaatagctgacactccatccttcctcttcctctgggttggtgatggtgttgggcttgagcaagggcgccaatgcctgaaaaagtggggtttcagaaggtgtgaagacatttgctgggtgaaaaccaacaaaagtaatgcagcaccaacattgcgacatgattctcgtactgtgtttcagcgttccaaggagcactgcttgatggggataaagggtactgttcgacgtagcactgatggccatataatccatgctaacatcgacactgacgtaattattgctgaagagcctccttatggttcgactcagaagcctgaagatatgtataggataatagagcattttgcacttggtcgccggaggcttgagcttttcggtgaagaccacaatattcgagctggctggcttactgttggaaaaggcctttcgtcctcaaactttgagccacaggcttatgtgaggaacttcgcagacaaggagggtaaagtgtggctaggaggaggaggaagaaatccacctccagacgcaccgcatcttgttgtgactactcccgatatagaatcgctgcggcccaaatcaccaatgaagaatcagcaacaacaatcgtatccatcgtctctagcttctgcaaattcctcaaaccgaagaaccacaggaaactcaccacaagcaaatcctaatgttgttgtcttacatcaagaggcttctggatctaacttctctgttcctaccaccccgcattgggtgccaccaacggcaccagctgccgcagggccacctccaatggacagctttagagtacctgaaggtggcaacaacacaagaccacctgacgacaagagttttgacatgtacggctttaattga

SEQ ID NO: 2 - protein, 963 aa, Arabidopsis thaliana
MKKKQEESSLEKLSTWYQDGEQDGGDRSEKRRMSLKASDFESSSRSGGSKSKEDNKSVVDVEHQDRDSKRERDGRERTHGSSSDSSKRKRWDEAGGLVNDGDHKSSKLSDSRHDSGGERVSVSNEHGESRRDLKSDRSLKTSSRDEKSKSRGVKDDDRGSPLKKTSGKDGSEVVREVGRSNRSKTPDADYEKEKYSRKDERSRGRDDGWSDRDRDQEGLKDNWKRRHSSSGDKDQKDGDLLYDRGREREFPRQGRERSEGERSHGRLGGRKDGNRGEAVKALSSGGVSNENYDVIEIQTKPHDYVRGESGPNFARMTESGQQPPKKPSNNEEEWAHNQEGRQRSETFGFGSYGEDSRDEAGEASSDYSGAKARNQRGSTPGRTNFVQTPNRGYQTPQGTRGNRPLRGGKGRPAGGRENQQGAIPMPIMGSPFANLGMPPPSPIHSLTPGMSPIPGTSVTPVFMPPFAPTLIWPGARGVDGNMLPVPPVLSPLPPGPSGPRFPSIGTPPNPNMFFTPPGSDRGGPPNFPGSNISGQMGRGMPSDKTSGGWVPPRGGGPPGKAPSRGEQNDYSQNFVDTGMRPQNFIRELELTNVEDYPKLRELIQKKDEIVSNSASAPMYLKGDLHEVELSPELFGTKFDVILVDPPWEEYVHRAPGVSDSMEYWTFEDIINLKIEAIADTPSFLFLWVGDGVGLEQGRQCLKKWGFRRCEDICWVKTNKSNAAPTLRHDSRTVFQRSKEHCLMGIKGTVRRSTDGHIIHANIDTDVIIAEEPPYGSTQKPEDMYRIIEHFALGRRRLELFGEDHNIRAGWLTVGKGLSSSNFEPQAYVRNFADKEGKVWLGGGGRNPPPDAPHLVVTTPDIESLRPKSPMKNQQQQSYPSSLASANSSNRRTTGNSPQANPNVVVLHQEASGSNFSVPTTPHWVPPTAPAAAGPPPMDSFRVPEGGNNTRPPDDKSFDMYGFN

SEQ ID NO: 3 - DNA, 2880 bp, Arabidopsis thaliana
  CDS (1)..(2880): DNA repair protein RAD54-like Protein, Linie P9
atggaggaagaagatgaagagatcttatcgtcttccgattgcgacgattccagcgatagttacaaggatgattctcaagattctgaaggagaaaacgataaccctgagtgcgaagaccttgcggtggtttctctttcatccgacgcagatcggaaatctaagaacgtaaaggatcttctgaggggcaatctagttgtgcaacggcagccactccttcctcgggtgctttcggtgtcagatggagcggcagtttgtaggaagcctttcaaacctccgtgttctcatggttatgattccacaggacaactttctcgtcgcctttcagctcgaaaacggtttgttccttggggttcctcaactccggttgtggttgctttacctactaagctggaagcatcaaccaatattgagagagatgaagaagaggaagttgtttgtctaccacctgatattgaacctttggtattgtggcaatctgaagaagatggaatgagcaatgtaacaactatcatggtgcattcagtgcttgtcaaatttcttcgccctcatcaaagagagggtgtccagttcatgttcgattgtgtttcaggattacatggttcggcaaatataaatggttgcattctggctgatgacatgggtttagggaagacattacagtccattactttactatacacacttctttgtcaaggatttgatgggacgcctatggttaaaaaggccattattgttacaccaacgagtcttgtcagtaactgggaagctgaaattaagaaatgggttggagacaggattcagcttatagccctctgtgagagcaccagagatgatgttttgtctggaatagatagtttcactcgaccaagaagcgctttgcaggtacttatcatttcttacgagacattccgaatgcactcatccaagttctgccagagtgaatcctgtgatcttctaatatgcgatgaggctcataggttgaaaaatgaccagacacttacaaacagggctttggcttcattgacatgcaaacgtcgagttttgttgtctggaactcccatgcagaatgacttggaagagttttttgccatggtcaacttcacaaatccagggagtttaggtgatgctgcacactttcgccattattatgaggcacctattatatgtggaagagaacctacagccactgaggaagagaaaaacttagctgctgaccgctccgcagaactgagttcaaaagtcaaccagtttattttgaggagaaccaatgcattgctctcaaatcacctaccacctaagataattgaagtagtttgttgcaagatgactactctccagtccactttgtacaaccattttattagctcgaaaaatcttaaaagggcgcttgctgataatgcaaaacaaaccaaagttttggcttatataacagctcttaagaagctctgcaatcatccaaagctaatctacgacacaataaaaagcggcaatcctggaactgttgggtttgagaattgcttagagttcttccctgcagaaatgttctctgggagatctggagcatggacagggggtgatggtgcctgggtcgagctctctgggaaaatgcatgttctctccagacttttggccaacctacgtcgaaaaactgatgaccgcatagtccttgtatcaaactacacacagacattggatctttttgctcaactctgtcgtgaaagaagatatccttttctgaggctggatggatcaacaacaatcagcaagaggcagaagcttgttaaccggttgaacgacccaacaaaggatgagtttgcatttctcttaagcagcaaggcgggtggctgtggattaaatttaattggtgctaatcgacttgttttgttcgatcctgattggaatcctgccaatgataaacaagctgctgctagagtttggagggatgggcaaaagaaaagagtatatgtctacaggtttcttagtactggaactattgaagaaaaggtttaccagcgccagatgtcaaaagaagggcttcaaaaagttattcagcatgaacagacggataacagcacgagacaggggaacttactttctacagaggatctacgagatttattttccttccatggggatgttaggtatgtgtttcttctgaaatcagggaatgttttatgcccactcagaacatcgtttctctatccacttttggggacagattttgtacctcaagatgatacacattcaaatggtttatctcaaagcctcttttctggtaatgtggctaggtctgaaatccatgaaaagatgagctgcagcaggtgccaaaatgatgcctctggtactgagaatatcgaagaagggaatgagaacaatgtagatgacaatgcttgccagattgaccaagaagacataggcggatttgcaaaagatgcaggatgctttaacttgttaaaaaactctgagagacaggtgggcactccattggaagaagatctaggaagctggggtcatcactttacctcaaaatccgttccagatgctatactgcaagcttcagcaggtgacgaggtgacgtttgttttcacaaaccaggtagatgggaagctcgttcccatcgaatcaaatgtcagtccaaaaacggtggagtccgaagagcacaatcggaaccaacctgtaaataagcgtgcctttaacaaaccacaacaaagacctcgggaaccgctgcagccgttatctctcaacgagaccacaaaaagagtgaagttgtctacttataagcgtttacatggtaatagtaacattgatgatgctcagattaaaatgtctttgcaaagaccaaatctagtttctgtaaatcacgatgatgattttgtatga

SEQ ID NO: 4 - protein, 959 aa, Arabidopsis thaliana
MEEEDEEILSSSDCDDSSDSYKDDSQDSEGENDNPECEDLAVVSLSSDADRKSKNVKDLLRGNLVVQRQPLLPRVLSVSDGAAVCRKPFKPPCSHGYDSTGQLSRRLSARKRFVPWGSSTPVVVALPTKLEASTNIERDEEEEVVCLPPDIEPLVLWQSEEDGMSNVTTIMVHSVLVKFLRPHQREGVQFMFDCVSGLHGSANINGCILADDMGLGKTLQSITLLYTLLCQGFDGTPMVKKAIIVTPTSLVSNWEAEIKKWVGDRIQLIALCESTRDDVLSGIDSFTRPRSALQVLIISYETFRMHSSKFCQSESCDLLICDEAHRLKNDQTLTNRALASLTCKRRVLLSGTPMQNDLEEFFAMVNFTNPGSLGDAAHFRHYYEAPIICGREPTATEEEKNLAADRSAELSSKVNQFILRRTNALLSNHLPPKIIEVVCCKMTTLQSTLYNHFISSKNLKRALADNAKQTKVLAYITALKKLCNHPKLIYDTIKSGNPGTVGFENCLEFFPAEMFSGRSGAWTGGDGAWVELSGKMHVLSRLLANLRRKTDDRIVLVSNYTQTLDLFAQLCRERRYPFLRLDGSTTISKRQKLVNRLNDPTKDEFAFLLSSKAGGCGLNLIGANRLVLFDPDWNPANDKQAAARVWRDGQKKRVYVYRFLSTGTIEEKVYQRQMSKEGLQKVIQHEQTDNSTRQGNLLSTEDLRDLFSFHGDVRYVFLLKSGNVLCPLRTSFLYPLLGTDFVPQDDTHSNGLSQSLFSGNVARSEIHEKMSCSRCQNDASGTENIEEGNENNVDDNACQIDQEDIGGFAKDAGCFNLLKNSERQVGTPLEEDLGSWGHHFTSKSVPDAILQASAGDEVTFVFTNQVDGKLVPIESNVSPKTVESEEHNRNQPVNKRAFNKPQQRPREPLQPLSLNETTKRVKLSTYKRLHGNSNIDDAQIKMSLQRPNLVSVNHDDDFV

SEQ ID NO: 5 - DNA, 552 bp, Arabidopsis thaliana
  CDS (1)..(552): Thioredoxin, Linie P38
atggctcttgttcaatccagaacttttccacacctcaacactccgttatcgccgattctatcctccctccatgctccgtcttctctctttatccggagggaaatccgaccggtagccgcgccgttctcctcctccaccgccggaaacttgcccttctcgccgttgacgcgtccgcgaaagcttctctgtcctccgcctcgcggcaagtttgtcagagaagattatcttgtgaagaaattgtcagctcaagaacttcaggaactggtgaaaggagataggaaggtgccgttgattgttgatttttatgcgacatggtgtggaccttgtatcttgatggcccaggaactagaaatgcttgcagtagagtatgagagcaatgcaataatcgtgaaagttgatacagatgatgagtacgagtttgcacgcgacatgcaggttcgagggttacctacattattcttcatcagtcctgacccaagcaaagatgcaatcaggacagaagggctaattccgttacagatgatgcacgatatcattgacaacgagatgtga

SEQ ID NO: 6 - protein, 183 aa, Arabidopsis thaliana
MALVQSRTFPHLNTPLSPILSSLHAPSSLFIRREIRPVAAPFSSSTAGNLPFSPLTRPRKLLCPPPRGKFVREDYLVKKLSAQELQELVKGDRKVPLIVDFYATWCGPCILMAQELEMLAVEYESNAIIVKVDTDDEYEFARDMQVRGLPTLFFISPDPSKDAIRTEGLIPLQMMHDIIDNEM

SEQ ID NO: 7 - DNA, 843 bp, Arabidopsis thaliana
  CDS (1)..(843): TAC Klons K15C23, Linie P44
atgacgacgcagatatttcagttgccgttaaagtactgtgcttcgagtttttcttccaccggccaacggaattacggtgcttcttcttcgccgtctccgattgtaatttgtaagagtaatggaatttccgatggtctttgggtgaagcggaggaagaacaatcggagatttggtagtttaatagttaagcaggagaaaggagacgtgacggagattcgagttccggttccgttaactttggagcaacaagagaaggagaaacaaaatcgagatgatgaagaagatgaaatcgatgaaggagatgtagatcctgaagatctcaaatacgtcaatgaaatcaaacgggtaattgagcttcttaggaggaatagagatatgatcttcagtgaggttaagttgactattatgattgaggatccaagggaactggaaagaaggaggcttcttggaatagaagatgcagatactccaagcagagatgatttggctgaagccttggaacaggtaaatgatgggaaaatccctaaagatcgtgcaactcttcggatgctgcatgaggaaatgatccgttggccaaatttagaggttgaggtttcaaagaagcaacgaggaaagtcaatgtacgctaaatccacagacactggaatagatccaaaagaagcagccaagagactcaacgtcgaatgggattcagctgctgcaattgaagaagtcgatgtcgatgatgaacaaggagtagtaaccaaagtcgcgggctatggagcgttgtacttcgtctcagctttaccagttatcattggtatctctgttgtattaattttgttttacaattccctacagtag

SEQ ID NO: 8 - protein, 280 aa, Arabidopsis thaliana
MTTQIFQLPLKYCASSFSSTGQRNYGASSSPSPIVICKSNGISDGLWVKRRKNNRRFGSLIVKQEKGDVTEIRVPVPLTLEQQEKEKQNRDDEEDEIDEGDVDPEDLKYVNEIKRVIELLRRNRDMIFSEVKLTIMIEDPRELERRRLLGIEDADTPSRDDLAEALEQVNDGKIPKDRATLRMLHEEMIRWPNLEVEVSKKQRGKSMYAKSTDTGIDPKEAAKRLNVEWDSAAAIEEVDVDDEQGVVTKVAGYGALYFVSALPVIIGISVVLILFYNSLQ

SEQ ID NO: 9 - DNA, 1416 bp, Arabidopsis thaliana
  CDS (1)..(1416): Linie P77
atggcttcacttcttattttcccccaccttcaccattttgattcttcactggaccgtagagaggtactagtagttcgccattcacaagcatcaaggcgatttctcactccgaaagcttcaattaatggcagcggaatcacaaacggagctgcagcggaaaccacctctaaacctagtcgcaaagggaggaagaagaagcaaacatcgacggtaattgagaaagataacaccgagactgatcctgaattgaatccggagttagctgattacgacgacgggatcgagtttccgtacgacgatccgcctcttgtgtgttgcttcggagctgtacagaaggagtttgttccggtggtgcgagtccatgataatccgatgcatcctgatatgtactcgcagtggaagatgctacagtgggatccaccggagtttgggagagctccgggaggtccgccgtcgaatgtggcgatctctcatgtacggttaggtgggagagctgcgtttatggggaaagtaggtgaagatgattttggagatgagcttgttctgatgatgaatcaggagagagttcagacgagagctgtgaaattcgatgagaattcgaaaactgcttgtactcgtgtcaagatcaagtttaaggacgggaaaatgatggcggagactgtgaaagaaccacctgaggactcgctatttgcttcagaactcaatttagctgtgcttaaagaggcgaggatttttcatttcaattcagaagtgttgacgtctcctacaatgcaatcaactctttttacggcaatacaatggtctaagaagtttggtgggcttattttctttgacttgaatctcccattaccgctgtggagatcgcgcaatgagactaggaagttgatcaagaaagcatggaatgaagcaaacatcattgaagtttcacagcaagagcttgagtttctacttgatgaagattactacgagaggagaagaaactacacaccacagtacttcgctgaggattttgatcagacgaaaaacagaagagactattaccattacacaccagaggaaatcaagtcattgtggcatgacaagctgaagctactggttgtgactgatggaacacttcggcttcattactatactcctacttttgatggtgttgtgattggaacagaagatgtgcttataactcctttcacctgtgataggacaggttctggtgatgctgttgttgcagggataatgagaaagctaacaacttgtcctgagatgtttgaggatcaggatgtgatggagcgacagctcaggtttgcagttgctgctgggatcatagcgcagtggacaattggtgcagttagaggtttccctactgaaagcgcgacacagaatttgaaagaacaagtttatgttccatcaatgtggtag

SEQ ID NO: 10 - protein, 471 aa, Arabidopsis thaliana
MASLLIFPHLHHFDSSLDRREVLVVRHSQASRRFLTPKASINGSGITNGAAAETTSKPSRKGRKKKQTSTVIEKDNTETDPELNPELADYDDGIEFPYDDPPLVCCFGAVQKEFVPVVRVHDNPMHPDMYSQWKMLQWDPPEFGRAPGGPPSNVAISHVRLGGRAAFMGKVGEDDFGDELVLMMNQERVQTRAVKFDENSKTACTRVKIKFKDGKMMAETVKEPPEDSLFASELNLAVLKEARIFHFNSEVLTSPTMQSTLFTAIQWSKKFGGLIFFDLNLPLPLWRSRNETRKLIKKAWNEANIIEVSQQELEFLLDEDYYERRRNYTPQYFAEDFDQTKNRRDYYHYTPEEIKSLWHDKLKLLVVTDGTLRLHYYTPTFDGVVIGTEDVLITPFTCDRTGSGDAVVAGIMRKLTTCPEMFEDQDVMERQLRFAVAAGIIAQWTIGAVRGFPTESATQNLKEQVYVPSMW

SEQ ID NO: 11 - DNA, 2277 bp, Arabidopsis thaliana
  CDS (1)..(2277): Linie P98
atgaacaactccaccagactcatctccctcttctctcctcatcctcctcctctctttctactccgtggtctctacatcagccgcatagccaatctccgccgtttccaccgccgtgcgtttcctccttcgtccgttgcctcaaccaatctatgttctttccgtccactcgtgtcattgccgccgcttatccccacgtttcctataggacgattctacaatcaccaagtccgtgtctccgccgcagattttgttccttcttatcacaaccagcagctacctgaatggacagagctactccaatctctctccaaagctggttacttctcagattccggttcgatttctggtttagaaagtgaattctttcccggttttcctgatgaacttctccgtccagctcttgcttgcttagctctagctcgtgaacgaccagaactgcttgaaatgctttcgaggagagacgttgaagtgctggtggagaatggaaagccatttttattcaagacaggtccagattcacttaaaaggatgagcctttacctaagaagtggtcttcagggcattggtaagttgatggatatggagaaggcgagtacagttgatttgatgaggcttattttgagttatgttgtggatgttgcttcttctgaggagagcaaacaacataacaaagagattatggagtcatcggttcgaagcctcttgagtcagatagcgaagatgagcttgcgtcctcctgagtcgaatgttcatgacacgatgcaaaatcagtactcagatagagatggacaaggagtcaggtcttttcagaataacgttgagatgaaacgtggtgactggatttgctcgaggtgcagtggcatgaactttgcgagaaatgtcaaatgcttccagtgtgatgaagcaagaccaaagagacagcttactggtagtgaatgggagtgtcctcaatgtgatttctataattacgggaggaatgtagcttgcttaagatgtgactgcaagcgacccagggactcttcactcaattcagccaactctgattattcaagtgaccctgaacttgagagaagactggtcgaaaacgaaaagaaagcacagaggtggcttagtaaagtagcacagggtggttctgatgcgaacagtgttgatacagatgaagatttcccagagattatgcctttgaggaaaggagtgaatagatatgttgttagcacgaggaagccacctcttgagagaaggttggctaatactgagaacagagtagctacagatggaaactcgaaaaggagcgacgataatgctttgggaagtaaaacaactaggagcttgaatgagattcttggttcttcatcctctttgacttctcgttctgatgacaagaatgtatcttccagaaggtttgaatcttctcagggaataaacaccgattttgttcctttcgtgccattaccttcggatatgtttgccaagaaacctaaggaggaaacacagataggtctgattgacaacatccaagtggatggtttctcaggcggcaatcaaaatgtctatcaagaggacaagtcagatgcaaatcactctggcaaagaaacagatcgccttgaaaaggaagatcacaaatcagaggaacctgcgaggtggttcaaacgggtcaccgaactgcacaatgtttcagacttggaaagcgcaataccgcaagagatttctcctgagaaaatgcctatgcgaaaaggagagaatcggtttgtagtgagtaggaagaaagaccgttcactgacttctccagcatacaagaggccagaagattcagactttgtcccctttgtccctttcccacctgactacttcgccaaagagaaacaacccaaggaatcaatagatactcttccagctccggcgacagaaaacgtttctcaggtagtacaacaagaaccaagagaaccttcaatcaacaaatctgatacagtggcagtgaagatcagaaatggaaagagcttggagggttcgttagtgaaggagtcagacttgttggacatgtcagaggaagcaaaagcagagagatggtttaagagagtggctgagattaagaacatatcagagctgagtgagatcccagacgaagatttcccgtcgataatgccgatgaggaaaggagtgaataggtttgttgtcagcaagaggaaaactcccttggaacggcgtttaacttctcaacgacaccagagaaatcctcatatcaccaactctgatcccactggtaaaggagataaatga

SEQ ID NO: 12 - protein, 758 aa, Arabidopsis thaliana
MNNSTRLISLFSPHPPPLFLLRGLYISRIANLRRFHRRAFPPSSVASTNLCSFRPLVSLPPLIPTFPIGRFYNHQVRVSAADFVPSYHNQQLPEWTELLQSLSKAGYFSDSGSISGLESEFFPGFPDELLRPALACLALARERPELLEMLSRRDVEVLVENGKPFLFKTGPDSLKRMSLYLRSGLQGIGKLMDMEKASTVDLMRLILSYVVDVASSEESKQHNKEIMESSVRSLLSQIAKMSLRPPESNVHDTMQNQYSDRDGQGVRSFQNNVEMKRGDWICSRCSGMNFARNVKCFQCDEARPKRQLTGSEWECPQCDFYNYGRNVACLRCDCKRPRDSSLNSANSDYSSDPELERRLVENEKKAQRWLSKVAQGGSDANSVDTDEDFPEIMPLRKGVNRYVVSTRKPPLERRLANTENRVATDGNSKRSDDNALGSKTTRSLNEILGSSSSLTSRSDDKNVSSRRFESSQGINTDFVPFVPLPSDMFAKKPKEETQIGLIDNIQVDGFSGGNQNVYQEDKSDANHSGKETDRLEKEDHKSEEPARWFKRVTELHNVSDLESAIPQEISPEKMPMRKGENRFVVSRKKDRSLTSPAYKRPEDSDFVPFVPFPPDYFAKEKQPKESIDTLPAPATENVSQVVQQEPREPSINKSDTVAVKIRNGKSLEGSLVKESDLLDMSEEAKAERWFKRVAEIKNISELSEIPDEDFPSIMPMRKGVNRFVVSKRKTPLERRLTSQRHQRNPHITNSDPTGKGDK

SEQ ID NO: 13 - DNA, 1359 bp, Arabidopsis thaliana
  CDS (1)..(1359): Linie P99b
atggctgttgcgctccaattcagccgattatgcgttcgaccggatactttcgtgcgggagaatcatctctctggatccggatctctccgccgccggaaagctttatcagtccggtgctcgtctggcgatgagaacgctccttcgccatcggtggtgatggactccgatttcgacgccaaggtgttccgtaagaacttgacgagaagcgataattacaatcgtaaagggttcggtcataaggaggagacactcaagctcatgaatcgagagtacaccagtgatatattggagacactgaaaacaaatgggtatacttattcttggggagatgttactgtgaaactcgctaaagcatatggtttttgctggggtgttgagcgtgctgttcagattgcatatgaagcacgaaagcagtttccagaggagaggctttggattactaacgaaatcattcataacccgaccgtcaataagaggttggaagatatggatgttaaaattattccggttgaggattcaaagaaacagtttgatgtagtagagaaagatgatgtggttatccttcctgcgtttggagctggtgttgacgagatgtatgttcttaatgataaaaagcataggttattgatatcttcctttttgacatttgtgactctaaaggtctggaacacggttgagaagcacaagaagggggaatacacatcagtaatccatggtaaatataatcatgaagagacgattgcaactgcgtcttttgcaggaaagtacatcattgtaaagaacatgaaagaggcaaattacgtttgtgattacattctcggtggccaatacgatggatctagctccacaaaagaggagttcatggagaaattcaaatacgcaatttcgaagggtttcgatcccgacaatgaccttgtcaaagttggtattgcaaaccaaacaacgatgctaaagggagaaacagaggagataggaagattactcgagacaacaatgatgcgcaagtatggagtggaaaatgagcgacaagacgcaatctatgagctagtggaagagaagattgacctcatgctagtggttggcggatggaattcaagtaacacctctcaccttcaggaaatctcagaggcacggggaatcccatcttactggatcgatagtgagaaacggataggacctgggaataaaatagcctataagctccactatggagaactggtcgagaaggaaaactttctcccaaagggaccaataacaatcggtgtgacatcaggtgcatcaaccccggataaggtcgtggaagatgctttggtgaaggtgttcgacattaaacgtgaagagttattgcagctggcttga

SEQ ID NO: 14 - protein, 452 aa, Arabidopsis thaliana
MAVALQFSRLCVRPDTFVRENHLSGSGSLRRRKALSVRCSSGDENAPSPSVVMDSDFDAKVFRKNLTRSDNYNRKGFGHKEETLKLMNREYTSDILETLKTNGYTYSWGDVTVKLAKAYGFCWGVERAVQIAYEARKQFPEERLWITNEIIHNPTVNKRLEDMDVKIIPVEDSKKQFDVVEKDDVVILPAFGAGVDEMYVLNDKKHRLLISSFLTFVTLKVWNTVEKHKKGEYTSVIHGKYNHEETIATASFAGKYIIVKNMKEANYVCDYILGGQYDGSSSTKEEFMEKFKYAISKGFDPDNDLVKVGIANQTTMLKGETEEIGRLLETTMMRKYGVENERQDAIYELVEEKIDLMLVVGGWNSSNTSHLQEISEARGIPSYWIDSEKRIGPGNKIAYKLHYGELVEKENFLPKGPITIGVTSGASTPDKVVEDALVKVFDIKREELLQLA

SEQ ID NO: 15 - DNA, 912 bp, Arabidopsis thaliana
  CDS (1)..(912): Linie P102
atgagtttcttcgctgttgcttgctccgcgccaagatcttctatgcttctcaccggcttgaattcgagcttctctgatatgcatcgcagcccactatttgttttcccggtgactatatcatcccggagcgtgaaacgcttcgccgctgtttcgtctgattccgtactagaccctgaatccaaaaatcaaactcggtcccgtcgcaaaaataaggaagcagttacgccaattgctgaaaccgagaacaatgaaaagtttccgacaaaggtcccgcgtaaatcgaagcgtgggcggcggagtgaagcagacgctgtggaagattacgtgagaagctccctcgagcgtactttctccaccataaaggagcagaatccggaggtttttgagaacaaggagaaggcgaatttcatcaaagacagaggcgttgatgaagaagaggaagaagaagaagagatggtggtggaagaggaagatccagattggccagtagatacagacgttggatggggaatcaaagcttcggagtatttcgatacacatccaatcaaaaacgtggttggagatgatgggagtgagattgattgggaaggtgagattgatgatagttgggtcaaggagatcaattgtttggaatgggaaagctttgcttttcatcctagtccactcgttgtccttgtattcgagcgatacaaaagagctagtgataactggaagacattgaaggagcttgagaaagctatcaaagtttattgggatgcgaaagatcgattacctccacgggcggttaagattgacctgaacatcgagacagatttggcatatgctcttaaagctaaggaatgcccacagattctcttcttacgcggaaaccggattctgtacagggagaaaggtgataagctatgttgctaa

SEQ ID NO: 16 - protein, 303 aa, Arabidopsis thaliana
MSFFAVACSAPRSSMLLTGLNSSFSDMHRSPLFVFPVTISSRSVKRFAAVSSDSVLDPESKNQTRSRRKNKEAVTPIAETENNEKFPTKVPRKSKRGRRSEADAVEDYVRSSLERTFSTIKEQNPEVFENKEKANFIKDRGVDEEEEEEEEMVVEEEDPDWPVDTDVGWGIKASEYFDTHPIKNVVGDDGSEIDWEGEIDDSWVKEINCLEWESFAFHPSPLVVLVFERYKRASDNWKTLKELEKAIKVYWDAKDRLPPRAVKIDLNIETDLAYALKAKECPQILFLRGNRILYREKGDKLCC

SEQ ID NO: 17 - DNA, 2337 bp, Arabidopsis thaliana
  CDS (1)..(2337): Linie P103
atgaacattctccgacctccgacgtcatcatcatcttcgtcgtttcctccatacccaaagcccgtttcattaacccctccggtatctttcactctcatccacaaccccataaacctctgctctataaacccaccattcaccaacgctggtcgaccaattttccaacggtccgcctccggcactgctaatagctccgccgaagacctctcgtctttcttgggctctccctcagaggcgtattcaacacacaacgaccaagagcttttgtttctcctccgcaatagaaaaaccgatgaagcttgggctaagtatgttcaatccactcatctccctggaccaacttgtcttagccgtttagtttctcaattatcttatcaatccaaacccgagagtctcacgcgcgcacaatctatcctcacgcgcctccgcaatgaacgccagctgcatcgccttgacgctaattccctcggtctcctcgccatggctgcagcgaagtctggccaaacactttacgccgtctccgtcatcaagtccatgattcgttctgggtatttacctcatgttaaagcgtggacagctgcagtagctagtctctctgcttccggagatgatggtccggaagaatctatcaaactcttcatcgctattacgcgacgagtcaaacgatttggtgaccagtctttggttggtcaatctaggcctgatacggcggcatttaatgcggtgcttaacgcttgtgctaaccttggtgatactgacaagtattggaagttgttcgaggaaatgtctgagtgggattgtgagcctgatgtcttgacttacaatgttatgattaagctttgtgcgagggttggtcggaaggaattgattgtgtttgtgttggaaaggattattgacaaggggattaaggtttgtatgactacaatgcattctcttgttgcagcttatgttgggtttggagatttgagaactgctgagaggattgttcaagcgatgagggagaaaaggagagatctttgtaaggttctacgagaatgcaacgctgaggatttgaaggagaaagaagaggaagaagcagaagatgatgaagatgcgtttgaggatgatgaagactcgggttattcggctcgggatgaggtaagtgaagagggggttgtagatgtgttcaagaaattgctacctaactcggttgatccgagtggtgagccaccattgttgcctaaagtctttgcaccagactcaaggatctacacgacgttgatgaaaggttatatgaagaatgggcgtgtggcagacacagctagaatgcttgaggcaatgaggcgtcaagatgatagaaacagtcacccagatgaagttacatacactacggttgtgtcagcttttgtaaatgcagggttgatggatagagcaagacaagtgttagccgagatggctcggatgggtgttcctgcaaataggattacttataatgttctgctcaaaggatattgtaagcagttgcagatagatagggcagaggatttactaagagagatgactgaagatgcggggatcgagccagacgtggtttcctataacattataatagatggatgcattcttatagatgatagcgcaggagctctagcgtttttcaatgaaatgagaacgagagggattgcaccaactaagattagttacacaactttgatgaaggcttttgcaatgtcggggcaacccaagttggcgaatagggtgtttgatgagatgatgaatgatccaagggtcaaagttgatttgatcgcgtggaacatgttggttgaagggtactgcaggctaggtttgattgaggatgctcagagagtagtgtcaagaatgaaagaaaacgggttttacccaaatgtggcaacctatgggagtctagccaatggggtttcgcaggcgaggaaacctggtgatgctctcttgctttggaaggagataaaggaaaggtgtgcggtgaaaaagaaagaagcaccttcagattcttcttcagatcctgctcctccgatgctgaaaccagatgaagggttgttagatacactagcggatatatgtgtcagggctgcttttttcaagaaggcattggagataatcgcatgtatggaggagaatgggatacctccgaataagactaagtacaagaagatctatgtggagatgcactcgaggatgttcactagcaaacatgcttcacaagccagaatagataggcgggtagaacgaaagagagcggctgaagctttcaagttttggctcggtttgcctaattcttattatggaagtgaatggaagttaggtccaagagaagactag

SEQ ID NO: 18 - protein, 778 aa, Arabidopsis thaliana
MNILRPPTSSSSSSFPPYPKPVSLTPPVSFTLIHNPINLCSINPPFTNAGRPIFQRSASGTANSSAEDLSSFLGSPSEAYSTHNDQELLFLLRNRKTDEAWAKYVQSTHLPGPTCLSRLVSQLSYQSKPESLTRAQSILTRLRNERQLHRLDANSLGLLAMAAAKSGQTLYAVSVIKSMIRSGYLPHVKAWTAAVASLSASGDDGPEESIKLFIAITRRVKRFGDQSLVGQSRPDTAAFNAVLNACANLGDTDKYWKLFEEMSEWDCEPDVLTYNVMIKLCARVGRKELIVFVLERIIDKGIKVCMTTMHSLVAAYVGFGDLRTAERIVQAMREKRRDLCKVLRECNAEDLKEKEEEEAEDDEDAFEDDEDSGYSARDEVSEEGVVDVFKKLLPNSVDPSGEPPLLPKVFAPDSRIYTTLMKGYMKNGRVADTARMLEAMRRQDDRNSHPDEVTYTTVVSAFVNAGLMDRARQVLAEMARMGVPANRITYNVLLKGYCKQLQIDRAEDLLREMTEDAGIEPDVVSYNIIIDGCILIDDSAGALAFFNEMRTRGIAPTKISYTTLMKAFAMSGQPKLANRVFDEMMNDPRVKVDLIAWNMLVEGYCRLGLIEDAQRVVSRMKENGFYPNVATYGSLANGVSQARKPGDALLLWKEIKERCAVKKKEAPSDSSSDPAPPMLKPDEGLLDTLADICVRAAFFKKALEIIACMEENGIPPNKTKYKKIYVEMHSRMFTSKHASQARIDRRVERKRAAEAFKFWLGLPNSYYGSEWKLGPRED

SEQ ID NO: 19 - DNA, 4053 bp, Arabidopsis thaliana
atgaagaagaaacaagaagagagttcgttggagaagctaagtacttggtatcaagatggagagcaagacggtggagatagaagtgagaagagaagaatgagtcttaaagcatcagactttgagagtagttctcgaagtggtggaagtaaaagcaaagaagataataagtctgttgttgatgttgagcatcaagatcgtgattccaagagagaaagagatgggagagaacgaacacatggatcttcttctgattcgagtaagaggaagagatgggatgaagcaggtggtcttgttaatgatggtgatcataaaagtagtaagctttctgattctagacatgatagtggtggagaaagagttagtgttagtaatgaacatggtgagagtaggagagatttgaagtctgataggagtttgaagactagtagtagagatgagaagagtaagagtcgtggtgtgaaagatgatgatagaggtagtcctttgaagaaaactagtggtaaggatggttctgaggtagttagagaagtgggtcgatctaataggtcgaaaacaccggatgcggattatgagaaggagaagtatagtcgaaaagatgagaggtctagaggtagggatgatgggtggtctgatagggatagagatcaagaaggtttgaaggataattggaagagaaggcattctagtagtggtgataaagatcagaaagatggggacttgctttatgatcgtggtagggaacgggaatttcctaggcaaggacgtgaaaggagtgaaggagagaggtctcatggtcgtttgggtgggaggaaagatggaaacaggggggaagctgttaaagctttgtccagtggtggcgtttcaaatgagaattatgatgtgattgagatacaaaccaagccacatgattatgtcaggggagaatcaggacccaactttgctcgtatgactgaatctggtcagcaacctcctaaaaaacctagtaataatgaggaagagtgggctcacaaccaggaaggtagacagagaagtgaaacttttggttttgggtcttatggggaagattcgagagatgaagctggtgaagccagttctgattactcaggggctaaagcaagaaaccagagaggttcaacacctggtagaactaattttgtgcaaacccctaatcgtggttatcagactccacaaggcactagagggaacagacccttaaggggtgggaaaggaagacctgccggtggcagagaaaaccaacaaggtgccattccaatgcctatcatggggtcaccatttgcaaaccttggaatgccaccacccagtcccattcattctcttactcctggcatgtcgccaattccgggcacttctgtcacccctgtcttcatgcctccatttgccccaactcttatatggcctggggcccgaggtgttgatggtaatatgctacctgttcctcctgttctttcacctcttcctcccggaccatcaggcccaagatttccttcaatcggcacaccaccaaacccgaatatgttctttactccaccaggttctgatagaggagggcctcctaactttcctgggtccaatatttctggacaaatgggacgtggaatgccatctgataagacttcagggggatgggttcctcctcgaggtggtggacctcctggtaaagctccttctaggggagagcaaaatgactattcccagaactttgtggatactggaatgcggccccagaatttcattcgggagctggagcttaccaatgtggaagactaccccaagcttagagagctcatacagaagaaggatgagattgtatctaattctgcttctgcaccaatgtatctgaaaggcgacttgcatgaagttgagttatctcccgagttatttggaacaaagtttgatgttattcttgttgacccaccatgggaggaatatgtccatagagctcctggtgtttctgatagtatggagtattggacatttgaggacattatcaatctcaagattgaggtgactatcctctacactcttcaattactcataggattttagggtacatgcattcgctcgttggtatacttcaattgctctttgcttagcaatagatctaatagcggggtagcatatatcatctgtcatctgagtattatctagatgaagtagtggtactcaacatatagtaatttaacttgtgtgtaggaccttgtgggtaaagttacctagatgacgtagtggtactcaacatatagatatagtaacttaacttgtctgtaaatcttgtgggtacggtttcctagatgatgtagctggtacgaaacatatagtattttaacttgtgtgtagaccttgtaggtaaggttgtttgccatcattgttatttataacaaaagtgaattcttccatgtatatgtaggcaatagctgacactccatccttcctcttcctctgggttggtgatggtgttgggcttgagcaagggcgccaatgcctgaaaaaggtacaggatccaaaccaaatcgcatttcctttattgttttggatttgtttctcttgacagtatgtacttaatctgtatttattttgtttgggtttgacagtggggtttcagaaggtgtgaagacatttgctgggtgaaaaccaacaaaagtaatgcagcaccaacattgcgacatgattctcgtactgtgtttcagcgttccaaggtccagtatggtctgccattgccttctcttttgttttccgtgttgcatatcttttgcttaatcttttgtattggtttctctttgtataggagcactgcttgatggggataaagggtactgttcgacgtagcactgatggccatataatccatgctaacatcgacactgacgtaattattgctgaagagcctccttatggttagtaaaatgtgtgttcctgatagactgataaaatcgagagtgtcttgcttgtcatatcatgttccttctctctgttctgcttccagcatcctgtttcttttaaagtgagcatgctagtacatcagcaatcaattgtgtataaataggatcgttgcttaatgtgattaaggtatcgagtgtttttgtatttggtactagtgttgggaggcaaggttttgggttctcgaaaacaaagacctatgtttcttttggctctcggttatggtacacgtgattagtttgctggattagtcttgggttatccacactgtaagctggttcattgagaaatacattagattctgtggttgattttagcattgccatgtctaaaatattagtgaatttgtatcctcctattattgcaagctggtttgcttaactgcatttctttacgttgcaaaactccaggttcgactcagaagcctgaagatatgtataggataatagagcattttgcacttggtcgccggaggcttgagcttttcggtgaagaccacaatattcgagctggctggcttactgttggaaaaggcctttcgtcctcaaactttgagccacaggtaagatctcatgttcgctctgtagacatctatccacctcctgtttatatgagctttagacctatgcaaggagcttctttgactgtttgatctgttttggatattgtgtgctttaggcttatgtgaggaacttcgcagacaaggagggtaaagtgtggctaggaggaggaggaagaaatccacctccagacgcaccgcatcttgttgtgactactcccgatatagaatcgctgcggcccaaatcaccaatgaagaatcagcaacaacaatcgtatccatcgtctctagcttctgcaaattcctcaaaccgaagaaccacaggaaactcaccacaagcaaatcctaatgttgttgtcttacatcaagaggcttctggatctaacttctctgttcctaccaccccgcattgggtgccaccaacggcaccagctgccgcagggccacctccaatggacagctttagagtacctgaaggtggcaacaacacaagaccacctgacgacaagagttttgacatgtacggctttaattga

SEQ ID NO: 20 - DNA, 6078 bp, Arabidopsis thaliana
atggaggaagaagatgaagagatcttatcgtcttccgattgcgacgattccagcgatagttacaaggatgattctcaagattctgaaggagaaaacgataaccctgagtgcgaagaccttgcggtggtttctctttcatccgacgcagatcggaaatctaagaacgtaaaggatcttctgaggtgcgtaattgaatttcctagatttcaatttgaaattgaagctgaaccctaaacctgatagatgcttcgttcgcttgctgctacatatcatttggagttttagtggttcgaatttagggattttaaaggagatttagtgttctcttgttcaaattgatgattgtgaatagtctctgaagctgtatcaaacgcgtattccattgttttatggaaatggaattgatacttatgcacggttgacaggggcaatctagttgtgcaacggcagccactccttcctcgggtgctttcggtgtcagatggagcggcagtttgtaggaagcctttcaaacctccgtgttctcatggttatgattccacaggacaactttctcgtcgcctttcagctcgaaaacggtttgttccttggggttcctcaactccggttgtggttgctttacctactaagctggaagcatcaaccaatattgagagagatgaagaagaggaagttgtttgtctaccacctgatattgaacctttggtattgtggcaatctgaagaagatggaatgagcaatgtaacaactatcatggtgcattcagtgcttgtcaaatttcttcgccctcatcaaaggtattcatttctatctaagaattgacatcgtgtacagagttttttttaaggatctcaaaacttgattccaatctgtgctgtgatcttaaaaattcttaaggcattcatagtttacttgttgaaccacgtcaaaatgtgctcttcgtttaaaatcatataaccctcagtgaactgctggtgaatacaacaggccaatgagtataaaattatctctagttggcatcgaagatgtttatacaactttacttacatggtgaggtggtttttctgagactgcagagagggtgtccagttcatgttcgattgtgtttcaggattacatggttcggcaaatataaatggttgcattctggctgatgacatggggtaaaatctatcttgtccgttatgtaaaattggatctggactttttttgtttcctatgtaattttcttatttccttctaaattgatttggcagtttagggaagacattacagtccattactttactatacacacttctttgtcaaggatttgatgggacgcctatggttaaaaaggccattattgttacaccaacgagtcttgtcagtaactgggaagctgaaattaagaaatgggttggagacaggattcagcttatagccctctgtgagagcaccagagatgatgttttgtctggaatagatagtttcactcgaccaagaagcgctttgcaggtatagctgtgcatatttttttgctgactctctgagaattgcacttatcacctaactaacgttaacaggtacttatcatttcttacgagacattccgaatgcactcatccaagttctgccagagtgaatcctgtgatcttctaatatgcgatgaggctcataggttgaaaaatgaccagacacttacaaacagggtaggatgcaaatacatacttatttcgtatccttccaggttgatacattttttttctttctaatattggttatcatcatatttgactacaggctttggcttcattgacatgcaaacgtcgagttttgttgtctggaactcccatgcaggtaatggaaaattccagtgattatctctattaaatttctcctgacatttaacactaagctttcactctatgtttttttgcatctgaatgttccagaatgacttggaagagttttttgccatggtcaacttcacaaatccagggagtttaggtgatgctgcacactttcgccattattatgaggtgacaaactttgaattttgatgccaatttgatcattctgtattctgtcatctataaatatgttaaagataaattcttgtaggctattctgtcatctctaaatatgttaaagatcatttcttctaggctattcttggctaaaagttaggattagcccaagttattttgtagtgtatactttgctactatatatattctgttcgtttccagtattgctgcttcatgcctttggattccattacattgtaagcttctttaaaaatagtctgtgctgagagaatttgtttacgctgttatctgtgtcatacaatttcagttcaattgactataggttgtttatgtttcttgcattaccttcttttgatgcatccttgttttgatgtatgaaacctaaggcacctattatatgtggaagagaacctacagccactgaggaagagaaaaacttagctgctgaccgctccgcagaactgagttcaaaagtcaaccaggtgattcttcttagcattttatatctaaatatttgactattattaagctttcatcatcatctggatatatctcttaaaagatatgcaatttgcttagatgattttggtatgatgatcaataaagagcatcgctactgaccttttagaattgttgcttaatttaactgctataccttattaagctttcatttttttacagtttattttgaggagaaccaatgcattgctctcaaatcacctaccacctaaggtgcttttccttctgtatctgccgcaggcttacaatgcattaaaattctgtttcagtagagcctttactacttctttatatgttgaactgtttcgtcatattgagtaatacctggagttttagcagtgatataatcatatgctgaaagtgcggatagaatgaacatctttgtgaaagtgtcatctctttttttagctacaagtttttcccgttgccgctttctttattttgaagccagaaatacatcaaaatcttgttgttggatgtttcacagataattgaagtagtttgttgcaagatgactactctccagtccactttgtacaaccattttattagctcgaaaaatgtaagcattgatcacagtcattcttgttatgtttcgtaaaatattgaagttagaactacatataatgggtgcctctgcatgcagcttaaaagggcgcttgctgataatgcaaaacaaaccaaagttttggcttatataacagctcttaagaagctctgcaatcatccaaaggtaaaactcatagcctcatccatttgcgtttaagtttttccaatattttcttctgagtcatctttgtaacatcttacggcgctattatcaagttctgatattaagacgctagtttcataaattttagtggtctttgatctatttgatcgtcaaaacctttttcatcattccccatgtatgcttaatgatagccctattcttttctgtgtagctaatctacgacacaataaaaagcggcaatcctggaactgttgggtttgagaattgcttagagttcttccctgcagaaatgttctctgggaggtaggcttctattgcatgtttgcatgttgtcactagttgggatctaaatggaactatcctttcagatctggagcatggacagggggtgatggtgcctgggtcgagctctctgggaaaatgcatgttctctccagacttttggccaacctacgtcgaaaaactgatgaccgcatagtccttgtatcaaactacacacaggtatgctggaaaatgtcaattcgagttggatataaagttacttttatatttatttgaaagggacagtgcataatattggtcatagagaatgaagtatgaaatgcctccacatggattttgaatagattcagctgctggtcgtcattagtgatgttactactgtcctaaatttcaattatggatgttgcaatctcttttgaattttgaattagtcataagctatgtgttatgctgtcctgagttttatgagccatcatatttttggaacttttgcatgtgatatcggagaagctaagaaaatcgttaccctgatttgtctatatgtattcaaaaggcaacgctttctaacaaatatcaagaagtgaactctgcatgttgtttgattgcataaaatgacatgatggtgtgttgcatatatatagcaatttaaaaccagcctgagtatacaataatcatagcctgcaccttttgcactagacattggatctttttgctcaactctgtcgtgaaagaagatatccttttctgaggctggatggatcaacaacaatcagcaagaggcagaagcttgttaaccggttgaacgacccaacaaaggtacatgacttatctatttatgccgttgtttcgaacctgagtagacacctggtttgacttttggttttggtaggatgagtttgcatttctcttaagcagcaaggcgggtggctgtggattaaatttaattggtgctaatcgacttgttttgttcgatcctgattggaatcctgccaatgataaacaagtaattaccatcctaatttccccttagatatgtttcaactttatattgataaaagatgatcgattgtgctgtacatgcattatttcgctgtcaaaacaggctgctgctagagtttggagggatgggcaaaagaaaagagtatatgtctacaggtttcttagtactggaactattgaagaaaaggtactgcataactagccgaacttgttactcaagtttccttgggggagtttgcttacctcagattcatatttgttttcttgtggtacattggtaggtttaccagcgccagatgtcaaaagaagggcttcaaaaagttattcagcatgaacagacggataacagcacgagacaggttcttgctggaatgttatatgcttcatctattagtcattttgtgtctaattattgaatatcaaccacaacatctttgattttccaggggaacttactttctacagaggatctacgagatttattttccttccatggggatgttaggtatgtgtttcttctgaaatcagggaatgttttatgcccactcagaacatcgtttctctatccacttttggggacagattttgtacctcaagatgatacacattcaaatggtttatctcaaagcctcttttctggtaatgtggctaggtctgaaatccatgaaaagatgagctgcagcaggtgccaaaatgatgcctctggtactgagaatatcgaagaagggaatgagaacaatgtagatgacaatgcttgccagattgaccaagaagacataggcggatttgcaaaagatgcaggatgctttaacttgttaaaaaactctgagagacaggtcccttcttgtgcttgttactgagtcctgcattaaatataagtctgttttgagctatttcttcatcaattccattgttagttacaaactctgctcatgtctttttacatccgattcatctacaaagtttttttcccatgaatattcttaggtgggcactccattggaagaagatctaggaagctggggtcatcactttacctcaaaatccgttccagatgctatactgcaagcttcagcaggtgacgaggtgagttgtctccaagttttttcaatcttataatcataaactctacatcttatgtcagatttttcgaaaagccaataactttatgataactattttcatggtttattaaaaacattgcaggtgacgtttgttttcacaaaccaggtagatgggaagctcgttcccatcgaatcaaatgtcagtccaaaaacggtggagtccgaagagcacaatcggaaccaacctgtaaataagcgtgcctttaacaaaccacaacaaagacctcgggaaccgctgcagccgttatctctcaacgagaccacaaaaagagtgaagttgtctacttataagcgtttacatggtaatagtaacattgatgatgctcagattaaaatgtctttgcaaagaccaaatctagtttctgtaaatcacgatgatgattttgtatga

SEQ ID NO: 21 - DNA, 1570 bp, Arabidopsis thaliana
atggctcttgttcaatccagaacttttccacacctcaacactccgttatcgccgattctatcctccctccatgctccgtcttctctctttatccggagggaaatccgaccggtagccgcgccgttctcctcctccaccgccggaaacttgcccttctcgccgttgacgcgtccgcgaaagcttctctgtcctccgcctcgcggcaagtttgtcagagaagattatcttgtggtacggacaatttctcgctttctctcacgctccaaacaacatattttgtcgatttcaaaaaatttcatgtttgttttcgttttacgacttcctttttcgcctttctgggaaattaagttggctgggcatagatgtagttattatataagaacgatatatggtagttctatcaaagattcgaccagtacactgttaaatacttcagaatagagatttgcttaatttgaatcttatgaatgactcttgttgataccatcatgtggaagcctcactgatttctggatgttttttgttccttttcttatggtttgacagaagaaattgtcagctcaagaacttcaggaactggtgaaaggagataggaaggtgccgttgattgttgatttttatgcgacatggtgtggaccttgtatcttgatggcccaggaactagaaatggtaccatggattctcataactcaactttcttacacattctccatttcacttgcttcatgtgtagactctagaatgcttatatatttccaaacgttggctcttggaacccggttgttcgttataatatacttgaatcttgaaatgtgatggtatattactgttaagtctagtgcagtactattgtaacttgcataggagttgggcagtgcattatagctttggtagctcatcaacaaatctttacagtttactgagatcttaatgtttaaagaggggctatgaaaatgtattgggggcactctggatttgtcttgggtcttggtttggcaattgactagagttgaaagaccgctctcattaatcaagtctcttctatggtttagttcttttggtgaattagataaaggagttaaacagttccaatcttacgactgtttctcccatactttatgacaaagataccttgtcgcgtagttggcatgtctacaaattcaaaagaaatgtgtgagataggagaatctaagcatcttcttattgattggctttatctacttgctttttcactcatgacactcgtgttaaatagtttttgctcattgtgaaacagcttgcagtagagtatgagagcaatgcaataatcgtgaaagttgatacagatgatgagtacgagtttgcacgcgacatgcaggtatactgtaacttgcagcttatgtttttaaatttcatgaatctcctctcagcatatcaatgtaaattcttacattaaccaactcttgtgatacaggttcgagggttacctacattattcttcatcagtcctgacccaagcaaagatgcaatcaggacagaagggctaattccgttacagatgatgcacgatatcattgacaacgagatgtga

SEQ ID NO: 22 - DNA, 1897 bp, Arabidopsis thaliana
atgacgacgcagatatttcagttgccgttaaagtactgtgcttcgagtttttcttccaccggccaacggaattacggtgcttcttcttcgccgtctccgattgtaatttgtaagagtaatggaatttccgatggtctttgggtgaagcggaggaagaacaatcggagatttggtagtttaatagttaagcaggagaaaggagacgtgacggagattcgagttccggttccgttaactttggagcaacaagagaaggagaaacaaaatcgagatgatgaagaagatgaaatcgatgaaggagatgtagatcctgaagatctcaaatacgtcaatgaaatcaaacgggttcgtgattcctttggctgagtgaaattgtagatagttgaatcagattgtactgaagtattttgtgtgtgtttaggtaattgagcttcttaggaggaatagagatatgatcttcagtgaggtaagctacattttcatggttctgtgttggtttttagtattggttttgattaagcccgagctttgtgtgtgtttgcatattataggttaagttgactattatgattgaggatccaagggaactggaaagaaggaggcttcttggaatagaagatgcagatactccaagcagagatgatttggctgaagccttggaacaggtgatatatattattatcttgagtctgccattaccttaatagtaaacttaagtgtgttgtgtgactggtacatgagccatatagacatcagttttctgctgagggtgaaaatgaactcatatatggctcaaggagggtctacagaatgctgttgtaaatcagttggttactgttgagtaagagtgttgtacagcttattacagtctttacatggaaacactgctcaaccaaccttttgttgagttgctttcatacttagatctgtcacatatctggtttcaagtaacattgtgatggctagtctaatatataagctaagtatgcaaaactgttccaaggcgtaactgtgcttgtgatagaaatctcacttgacaacaccaagttgagcagtttgctctttgtagcgacatggggttattaagtggcattagtatgaagatccttaaaaatgaattgattgctttacacaggtaaatgatgggaaaatccctaaagatcgtgcaactcttcggatgctgcatgaggaaatgatccgttggccaaatttagaggtacctcttctttgtacctcacaattgttttttgttgcctattggtgggactgataggaagaaactgccttaggcaatataaatctataatgacatctctccttaggcaatttaaatccataatccgtaatggttcctattgatgctagaaactataatggaagagatctcttttcttttgtgtaactctggtgacggctatatacatttagttagttagctaagcagaactctgttttaaagccctatcttaacaccttatcttatttatcttataaggttgaggtttcaaagaagcaacgaggaaagtcaatgtacgctaaatccacagacactggaatagatccaaaagaagcagccaagagactcaacgtcgaatgggattcagctgctgcaattgaagaagtcgatgtcgatgatgaacaaggagtagtaaccaaagtcgcggtttgttcccatatcactctcaaacactttcacagctttgacctggaaatcgttattctttcacaacattttaagcgttccgtatttgactttttgaaatctgattgatatttctcctgccttttgttcttaatccgtttgcagggctatggagcgttgtacttcgtctcagctttaccagttatcattggtatctctgttgtattaattttgttttacaattccctacagtag

SEQ ID NO: 23 - DNA, 1691 bp, Arabidopsis thaliana
atggcttcacttcttattttcccccaccttcaccattttgattcttcactggaccgtagagaggtactagtagttcgccattcacaagcatcaaggcgatttctcactccgaaagcttcaattaatggcagcggaatcacaaacggagctgcagcggaaaccacctctaaacctagtcgcaaagggaggaagaagaagcaaacatcgacggtaattgagaaagataacaccgagactgatcctgaattgaatccggagttagctgattacgacgacgggatcgagtttccgtacgacgatccgcctcttgtgtgttgcttcggagctgtacagaaggagtttgttccggtggtgcgagtccatgataatccgatgcatcctgatatgtactcgcagtggaagatgctacagtgggatccaccggagtttgggagagctccgggaggtccgccgtcgaatgtggcgatctctcatgtacggttaggtgggagagctgcgtttatggggaaagtaggtgaagatgattttggagatgagcttgttctgatgatgaatcaggagagagttcagacgagagctgtgaaattcgatgagaattcgaaaactgcttgtactcgtgtcaagatcaagtttaaggacgggaaaatgatggcggagactgtgaaagaaccacctgaggactcgctatttgcttcagaactcaatttagctgtgcttaaagaggtaacaatctttcaatctatgaggaacaatctagggtttaagaggaacaatctagggtgtatgacattatagctcgagcataatcatgaaacagagcacctagggtttaggaggaacaagtttagtctagggtttatgacatgaaagctcgagcttggtttcttatgcaaaagtctctgtctttgagcataaaggataagatttggataatgaaacagagcacttctctgcttggtttttaagctttttgtttgttactggtgcttctaatgcaggcgaggatttttcatttcaattcagaagtgttgacgtctcctacaatgcaatcaactctttttacggcaatacaatggtctaagaagtttggtgggcttattttctttgacttgaatctcccattaccgctgtggagatcgcgcaatgagactaggaagttgatcaagaaagcatggaatgaagcaaacatcattgaagtttcacagcaagagcttgagtttctacttgatgaagattactacgagaggagaagaaactacacaccacagtacttcgctgaggattttgatcagacgaaaaacagaagagactattaccattacacaccagaggaaatcaagtcattgtggcatgacaagctgaagctactggttgtgactgatggaacacttcggcttcattactatactcctacttttgatggtgttgtgattggaacagaagatgtgcttataactcctttcacctgtgataggacaggttctggtgatgctgttgttgcagggataatgagaaagctaacaacttgtcctgagatgtttgaggatcaggatgtgatggagcgacagctcaggtttgcagttgctgctgggatcatagcgcagtggacaattggtgcagttagaggtttccctactgaaagcgcgacacagaatttgaaagaacaagtttatgttccatcaatgtggtag

SEQ ID NO: 24 - DNA, 1289 bp, Arabidopsis thaliana
atgagtttcttcgctgttgcttgctccgcgccaagatcttctatgcttctcaccggcttgaattcgagcttctctgatatgcatcgcagcccactatttgttttcccggtgactatatcatcccggagcgtgaaacgcttcgccgctgtttcgtctgattccgtactagaccctgaatccaaaaatcaaactcggtcccgtcgcaaaaataaggaagcagttacgccaattgctgaaaccgagaacaatgaaaagtttccgacaaaggtcccgcgtaaatcgaagcgtgggcggcggagtgaagcagacgctgtggaagattacgtgagaagctccctcgagcgtactttctccaccataaaggagcagaatccggaggtttttgagaacaaggagaaggcgaatttcatcaaagacagaggcgttgatgaagaagaggaagaagaagaagagatggtggtggaagaggaagatccagattggccagtagatacagacgttggatggggaatcaaagcttcggagtatttcgatacacatccaatcaaaaacgtggttggagatgatgggagtgagattgattgggaaggtgagattgatgatagttgggtcaaggagatcaattgtttggaatgggaaagctttgcttttcatcctagtccactcgttgtccttgtattcgagcgatacaaaaggtataagctttgttatttcattgacgaattttcacaaacacttggtgtgcatagtagaactatgaaagctttgttctttttccttcacaacattatctagactatgattacaagttgaaagagccatttgagttagattccatgatcaattaactgcaatgagtataaaaactgaaacttgttcttagagtgaccaaaatctactactgttggaataattttttgagttgttgtgcgttttatagagctagtgataactggaagacattgaaggagcttgagaaagctatcaaagtttattgggatgcgaaagatcgattacctccacgggtatgtcgaaagccttctctagttgcagttttaacttgaacattactctttgtgtactaatctctcttggtgtgattacatgttaatgtggctgctctctgttaacaagaatcaccatgttttatgaaacaggcggttaagattgacctgaacatcgagacagatttggcatatgctcttaaagctaaggaatgcccacagattctcttcttacgcggaaaccggattctgtacagggagaaaggtgataagctatgttgctaa

SEQ ID NO: 25 - DNA, 8045 bp, Unknown
  pMTX 1a300
actttgatccaacccctccgctgctatagtgcagtcggcttctgacgttcagtgcagccgtcttctgaaaacgacatgtcgcacaagtcctaagttacgcgacaggctgccgccctgcccttttcctggcgttttcttgtcgcgtgttttagtcgcataaagtagaatacttgcgactagaaccggagacattacgccatgaacaagagcgccgccgctggcctgctgggctatgcccgcgtcagcaccgacgaccaggacttgaccaaccaacgggccgaactgcacgcggccggctgcaccaagctgttttccgagaagatcaccggcaccaggcgcgaccgcccggagctggccaggatgcttgaccacctacgccctggcgacgttgtgacagtgaccaggctagaccgcctggcccgcagcacccgcgacctactggacattgccgagcgcatccaggaggccggcgcgggcctgcgtagcctggcagagccgtgggccgacaccaccacgccggccggccgcatggtgttgaccgtgttcgccggcattgccgagttcgagcgttccctaatcatcgaccgcacccggagcgggcgcgaggccgccaaggcccgaggcgtgaagtttggcccccgccctaccctcaccccggcacagatcgcgcacgcccgcgagctgatcgaccaggaaggccgcaccgtgaaagaggcggctgcactgcttggcgtgcatcgctcgaccctgtaccgcgcacttgagcgcagcgaggaagtgacgcccaccgaggccaggcggcgcggtgccttccgtgaggacgcattgaccgaggccgacgccctggcggccgccgagaatgaacgccaagaggaacaagcatgaaaccgcaccaggacggccaggacgaaccgtttttcattaccgaagagatcgaggcggagatgatcgcggccgggtacgtgttcgagccgcccgcgcacgtctcaaccgtgcggctgcatgaaatcctggccggtttgtctgatgccaagctggcggcctggccggccagcttggccgctgaagaaaccgagcgccgccgtctaaaaaggtgatgtgtatttgagtaaaacagcttgcgtcatgcggtcgctgcgtatatgatgcgatgagtaaataaacaaatacgcaaggggaacgcatgaaggttatcgctgtacttaaccagaaaggcgggtcaggcaagacgaccatcgcaacccatctagcccgcgccctgcaactcgccggggccgatgttctgttagtcgattccgatccccagggcagtgcccgcgattgggcggccgtgcgggaagatcaaccgctaaccgttgtcggcatcgaccgcccgacgattgaccgcgacgtgaaggccatcggccggcgcgacttcgtagtgatcgacggagcgccccaggcggcggacttggctgtgtccgcgatcaaggcagccgacttcgtgctgattccggtgcagccaagcccttacgacatatgggccaccgccgacctggtggagctggttaagcagcgcattgaggtcacggatggaaggctacaagcggcctttgtcgtgtcgcgggcgatcaaaggcacgcgcatcggcggtgaggttgccgaggcgctggccgggtacgagctgcccattcttgagtcccgtatcacgcagcgcgtgagctacccaggcactgccgccgccggcacaaccgttcttgaatcagaacccgagggcgacgctgcccgcgaggtccaggcgctggccgctgaaattaaatcaaaactcatttgagttaatgaggtaaagagaaaatgagcaaaagcacaaacacgctaagtgccggccgtccgagcgcacgcagcagcaaggctgcaacgttggccagcctggcagacacgccagccatgaagcgggtcaactttcagttgccggcggaggatcacaccaagctgaagatgtacgcggtacgccaaggcaagaccattaccgagctgctatctgaatacatcgcgcagctaccagagtaaatgagcaaatgaataaatgagtagatgaattttagcggctaaaggaggcggcatggaaaatcaagaacaaccaggcaccgacgccgtggaatgccccatgtgtggaggaacgggcggttggccaggcgtaagcggctgggttgtctgccggccctgcaatggcactggaacccccaagcccgaggaatcggcgtgacggtcgcaaaccatccggcccggtacaaatcggcgcggcgctgggtgatgacctggtggagaagttgaaggccgcgcaggccgcccagcggcaacgcatcgaggcagaagcacgccccggtgaatcgtggcaagcggccgctgatcgaatccgcaaagaatcccggcaaccgccggcagccggtgcgccgtcgattaggaagccgcccaagggcgacgagcaaccagattttttcgttccgatgctctatgacgtgggcacccgcgatagtcgcagcatcatggacgtggccgttttccgtctgtcgaagcgtgaccgacgagctggcgaggtgatccgctacgagcttccagacgggcacgtagaggtttccgcagggccggccggcatggccagtgtgtgggattacgacctggtactgatggcggtttcccatctaaccgaatccatgaaccgataccgggaagggaagggagacaagcccggccgcgtgttccgtccacacgttgcggacgtactcaagttctgccggcgagccgatggcggaaagcagaaagacgacctggtagaaacctgcattcggttaaacaccacgcacgttgccatgcagcgtacgaagaaggccaagaacggccgcctggtgacggtatccgagggtgaagccttgattagccgctacaagatcgtaaagagcgaaaccgggcggccggagtacatcgagatcgagctagctgattggatgtaccgcgagatcacagaaggcaagaacccggacgtgctgacggttcaccccgattactttttgatcgatcccggcatcggccgttttctctaccgcctggcacgccgcgccgcaggcaaggcagaagccagatggttgttcaagacgatctacgaacgcagtggcagcgccggagagttcaagaagttctgtttcaccgtgcgcaagctgatcgggtcaaatgacctgccggagtacgatttgaaggaggaggcggggcaggctggcccgatcctagtcatgcgctaccgcaacctgatcgagggcgaagcatccgccggttcctaatgtacggagcagatgctagggcaaattgccctagcaggggaaaaaggtcgaaaaggtctctttcctgtggatagcacgtacattgggaacccaaagccgtacattgggaaccggaacccgtacattgggaacccaaagccgtacattgggaaccggtcacacatgtaagtgactgatataaaagagaaaaaaggcgatttttccgcctaaaactctttaaaacttattaaaactcttaaaacccgcctggcctgtgcataactgtctggccagcgcacagccgaagagctgcaaaaagcgcctacccttcggtcgctgcgctccctacgccccgccgcttcgcgtcggcctatcgcggccgctggccgctcaaaaatggctggcctacggccaggcaatctaccagggcgcggacaagccgcgccgtcgccactcgaccgccggcgcccacatcaaggcaccctgcctcgcgcgtttcggtgatgacggtgaaaacctctgacacatgcagctcccggagacggtcacagcttgtctgtaagcggatgccgggagcagacaagcccgtcagggcgcgtcagcgggtgttggcgggtgtcggggcgcagccatgacccagtcacgtagcgatagcggagtgtatactggcttaactatgcggcatcagagcagattgtactgagagtgcaccatatgcggtgtgaaataccgcacagatgcgtaaggagaaaataccgcatcaggcgctcttccgcttcctcgctcactgactcgctgcgctcggtcgttcggctgcggcgagcggtatcagctcactcaaaggcggtaatacggttatccacagaatcaggggataacgcaggaaagaacatgtgagcaaaaggccagcaaaaggccaggaaccgtaaaaaggccgcgttgctggcgtttttccataggctccgcccccctgacgagcatcacaaaaatcgacgctcaagtcagaggtggcgaaacccgacaggactataaagataccaggcgtttccccctggaagctccctcgtgcgctctcctgttccgaccctgccgcttaccggatacctgtccgcctttctcccttcgggaagcgtggcgctttctcatagctcacgctgtaggtatctcagttcggtgtaggtcgttcgctccaagctgggctgtgtgcacgaaccccccgttcagcccgaccgctgcgccttatccggtaactatcgtcttgagtccaacccggtaagacacgacttatcgccactggcagcagccactggtaacaggattagcagagcgaggtatgtaggcggtgctacagagttcttgaagtggtggcctaactacggctacactagaaggacagtatttggtatctgcgctctgctgaagccagttaccttcggaaaaagagttggtagctcttgatccggcaaacaaaccaccgctggtagcggtggtttttttgtttgcaagcagcagattacgcgcagaaaaaaaggatctcaagaagatcctttgatcttttctacggggtctgacgctcagtggaacgaaaactcacgttaagggattttggtcatgcattctaggtactaaaacaattcatccagtaaaatataatattttattttctcccaatcaggcttgatccccagtaagtcaaaaaatagctcgacatactgttcttccccgatatcctccctgatcgaccggacgcagaaggcaatgtcataccacttgtccgccctgccgcttctcccaagatcaataaagccacttactttgccatctttcacaaagatgttgctgtctcccaggtcgccgtgggaaaagacaagttcctcttcgggcttttccgtctttaaaaaatcatacagctcgcgcggatctttaaatggagtgtcttcttcccagttttcgcaatccacatcggccagatcgttattcagtaagtaatccaattcggctaagcggctgtctaagctattcgtatagggacaatccgatatgtcgatggagtgaaagagcctgatgcactccgcatacagctcgataatcttttcagggctttgttcatcttcatactcttccgagcaaaggacgccatcggcctcactcatgagcagattgctccagccatcatgccgttcaaagtgcaggacctttggaacaggcagctttccttccagccatagcatcatgtccttttcccgttccacatcataggtggtccctttataccggctgtccgtcatttttaaatataggttttcattttctcccaccagcttatataccttagcaggagacattccttccgtatcttttacgcagcggtatttttcgatcagttttttcaattccggtgatattctcattttagccatttattatttccttcctcttttctacagtatttaaagataccccaagaagctaattataacaagacgaactccaattcactgttccttgcattctaaaaccttaaataccagaaaacagctttttcaaagttgttttcaaagttggcgtataacatagtatcgacggagccgattttgaaaccgcggtgatcacaggcagcaacgctctgtcatcgttacaatcaacatgctaccctccgcgagatcatccgtgtttcaaacccggcagcttagttgccgttcttccgaatagcatcggtaacatgagcaaagtctgccgccttacaacggctctcccgctgacgccgtcccggactgatgggctgcctgtatcgagtggtgattttgtgccgagctgccggtcggggagctgttggctggctggtggcaggatatattgtggtgtaaacaaattgacgcttagacaacttaataacacattgcggacgtttttaatgtactgaattaacgccgaattactagatatcgatttggtgtatcgagattggttatgaaattcagatgctagtgtaatgtattggtaatttgggaagatataataggaagcaaggctatttatccatttctgaaaaggcgaaatggcgtcaccgcgagcgtcacgcgcattccgttcttgctgtaaagcgttgtttggtacacttttgactagcgaggcttggcgtgtcagcgtatctattcaaaagtcgttaatggctgcggatcaagaaaaagttggaatagaaacagaatacccgcgaaattcaggcccggttgccatgtcctacacgccgaaataaacgaccaaattagtagaaaaataaaaactgactcggatacttacgtcacgtcttgcgcactgatttgaaaaatctcaatataaacaaagacggccacaagaaaaaaccaaaacaccgatattcattaatcttatctagtttctcaaaaaaattcatatcttccacacgtggatccgtcgagtctaccatgagcccagaacgacgcccggccgacatccgccgtgccaccgaggcggacatgccggcggtctgcaccatcgtcaaccactacatcgagacaagcacggtcaacttccgtaccgagccgcaggaaccgcaggagtggacggacgacctcgtccgtctgcgggagcgctatccctggctcgtcgccgaggtggacggcgaggtcgccggcatcgcctacgcgggcccctggaaggcacgcaacgcctacgactggacggccgagtcgaccgtgtacgtctccccccgccaccagcggacgggactgggctccacgctctacacccacctgctgaagtccctggaggcacagggcttcaagagcgtggtcgctgtcatcgggctgcccaacgacccgagcgtgcgcatgcacgaggcgctcggatatgccccccgcggcatgctgcgggcggccggcttcaagcacgggaactggcatgacgtgggtttctggcagctggacttcagcctgccggtaccgccccgtccggtcctgcccgtcaccgagatttgactcgaccggcatgccctgctttaatgagatatgcgagacgcctatgatcgcatgatatttgctttcaattctgttgtgcacgttgtaaaaaacctgagcatgtgtagctcagatccttaccgccggtttcggttcattctaatgaatatatcacccgttactatcgtatttttatgaataatattctccgttcaatttactgattgtccaagcttaatgtgagttagctcactcattaggcaccccaggctttacactttatgcttccggctcgtatgttgtgtggaattgtgagcggataacaatttcacacaggaaacagctatgacatgattacgaattcgagctcggtacccggggatcctctagagtcgacctgcaggcatgcaagcttggcactggccgtcgttttacaacgtcgtgactgggaaaaccctggcgttacccaacttaatcgccttgcagcacatccccctttcgccagctggcgtaatagcgaagaggcccgcaccgatcgcccttcccaacagttgcgcagcctgaatggcgaatgctagagcagcttgagcttggatcagattgtcgtttcccgccttcagtttaaactatcagtgtttgacaggatatattggcgggtaaacctaagagaaaagagcgtttattagaataacggatatttaaaagggcgtgaaaaggtttatccgttcgtccatttgtatgtgcatgccaaccacagggttcccctcgggatcaaagt

SEQ ID NO: 26 - DNA, 561 bp, Arabidopsis thaliana
  CDS (1)..(561)
atggcggcatcatcatctcatctcttcgcactcccttcgcctgcttctccgtttctatctgcaccaaaccggaatcgagttcgtgttcttgcgaaatcatgcccggagaatcagagcttcgactccaacgattcggattcttcctcagagactacccacaaagcccagggagatcagaaatcagtgtcacggagacagtggatgacggcatgtgtgtgcgcatctgcagctttaattagcaattcttatacctttgtctctgtacaaagcgcagccgctttagacaagaaaccaggaggttcatgtcgtaactgccagggcagtggtgctgttctttgtgatatgtgtggtggtacaggaaaatggaaagctctcaaccgaaaacgtgcgaaagatgtatatgagtttacggaatgtccaaactgttacggtcgaggtaagcttgtttgtccggtctgtttaggtacaggtttaccaaacaacaaaggccttcttagaaggcctggtgctcgtgagctactcgaaaagatgtacaatggtcggcttcttcctgattcatga

SEQ ID NO: 27 - protein, 186 aa, Arabidopsis thaliana
MAASSSHLFALPSPASPFLSAPNRNRVRVLAKSCPENQSFDSNDSDSSSETTHKAQGDQKSVSRRQWMTACVCASAALISNSYTFVSVQSAAALDKKPGGSCRNCQGSGAVLCDMCGGTGKWKALNRKRAKDVYEFTECPNCYGRGKLVCPVCLGTGLPNNKGLLRRPGARELLEKMYNGRLLPDS

SEQ ID NO: 28 - DNA, 2157 bp, Arabidopsis thaliana
  CDS (1)..(2157)
atgagaaatggaataaatattttatcttatccacgatttttgtcgttttgtgaggtctttgttctgctcttgtgtaacttcagcgataacccaaagttgcagacttttactcaaatgctaaactctctcttcctctcggcgcgagcttttccatctttgatcactaactcttcctctcggcgcgccaaaagttcccaatttgatcagtttagggaaaacagaggagtctctgatgctgcgattaaggttcctactgctccatggatgaaaggtcctctcttgcttcgacccgatgagattctcgacactaagaagagaaacaagccacggaaagttgaagagaagacgttcaaggcgttgaatcgtagagagagtggtgtcagaggaaagaaagcgatgaagaagatcgtgcgtaacgttgaaaagctcgatgaagatagtgattctgaagaaacccagatggatgatttgagcgaattcgagtatttaggtcgaattgaggagaaagttgagtccaaggatagatttggcgggaaaatgccatgggagagagaagaagagaggtttatattaaggaggatgaagaaggagagcgttccgactactgctgagcttattcttgacgagggattgttgaatagactgagacgtgaagcttcgaagatgagaaaatgggtgaatgtgaggaaagcaggtgttactgagttagttgtgaataagattaaatcgatgtggaagttgaatgagcttgctatggtgagatttgatgttcctctgtgtcgaaacatggagcgagctcaagagattatagagactggaggcttggttgtgttaagcaagaaggagtttttagttgtttatcgaggaggaccgagttattcatcagagggacaagatgagattagctcatcattgtacgagagagaagctgataggttactggatggtttgggacctagatatatggattggtggatgagaagaccgtttcccgttgatgctgacttgcttcctgaagttgttaatggatatatgactccatctagacgttgtccaccaaacactagagctaagctaaccgatgaagagcttacctacttgagaaacattgctcaacctttaccgtttcatttcgtccttgggaggaactatgggcttcaaggtttagcttccgctatcgtgaaactatgggagaaatgtattattgcaaagattgcaatcaaatggggagctctcaatacaaacaatgaggaaatggcagatgaattgaggtatctcactggcggtgttctgattctacgcaacaaatacttgatagtactatacagaggcaaggacttcctttctgatgaggtcgcggatttggttgaggacagagagagattactcagcagataccaacattttgaagaaactaaacgcgagagcgatatagaactcttggaggtggtaacaaatggtaaacagttgaaggaaacaaacaaaagtggaactttattagagtttcaagaactgcaaagaaaattcggagaaatggacccgagaaacctagagactgaagctgagaaagcaagactagagaaggaactcaaaagccaagaacacaagctttccatactaaaatcaaagatagagaaatcaaatatggagttgtttaaattaaattctttgtggaaaccatcggagggagatgatgacatcgagatattgactaatgaagaaagagaatgcttgagaagaatagggctgaagatgaacagcagcttagttcttggtagaagaggagtcttttttggtgtaatggaaggtctacatcagcattggaagcacagggaagtagcaaaagtgatcacgatgcagaagcttttctccagagttgtctacacagcaaaagcgcttgaaacagagagcaatggagtactaatctcaatcgaaaaacttaaagaagggcacgccatactcatataccgtggcaagaactacaaacgtccttcatcgaaactgatggcacagaatcttttgacgaaaagaaaagcattgcaacgatctgttgtgatgcagcgactcggctcactgaagttctttgcttaccagagagagagagcaatagaagatttgaaggtgagtttggtaaatcttcaagactctgctttctga

SEQ ID NO: 29 - protein, 718 aa, Arabidopsis thaliana
MRNGINILSYPRFLSFCEVFVLLLCNFSDNPKLQTFTQMLNSLFLSARAFPSLITNSSSRRAKSSQFDQFRENRGVSDAAIKVPTAPWMKGPLLLRPDEILDTKKRNKPRKVEEKTFKALNRRESGVRGKKAMKKIVRNVEKLDEDSDSEETQMDDLSEFEYLGRIEEKVESKDRFGGKMPWEREEERFILRRMKKESVPTTAELILDEGLLNRLRREASKMRKWVNVRKAGVTELVVNKIKSMWKLNELAMVRFDVPLCRNMERAQEIIETGGLVVLSKKEFLVVYRGGPSYSSEGQDEISSSLYEREADRLLDGLGPRYMDWWMRRPFPVDADLLPEVVNGYMTPSRRCPPNTRAKLTDEELTYLRNIAQPLPFHFVLGRNYGLQGLASAIVKLWEKCIIAKIAIKWGALNTNNEEMADELRYLTGGVLILRNKYLIVLYRGKDFLSDEVADLVEDRERLLSRYQHFEETKRESDIELLEVVTNGKQLKETNKSGTLLEFQELQRKFGEMDPRNLETEAEKARLEKELKSQEHKLSILKSKIEKSNMELFKLNSLWKPSEGDDDIEILTNEERECLRRIGLKMNSSLVLGRRGVFFGVMEGLHQHWKHREVAKVITMQKLFSRVVYTAKALETESNGVLISIEKLKEGHAILIYRGKNYKRPSSKLMAQNLLTKRKALQRSVVMQRLGSLKFFAYQRERAIEDLKVSLVNLQDSAF

SEQ ID NO: 30 - DNA, 2865 bp, Arabidopsis thaliana
  CDS (1)..(2865)
atgggttttgtaggttttgttaccagaacctctgcaggtgtttctccttctatcttacttcccagatcaactcagtctcctcagattattgctaagagctcatcagtatcagtacagccagtgtctgaggatgctaaggaggattatcagtccaaagatgttagtggagattcaatacggcggcgttttcttgaattctttgcttctcgtggtcataaggtgcttccaagttcgtctcttgtaccagaagatcctaccgtcttgctaacaattgcaggaatgcttcagtttaagcctattttccttggaaaggtacctagagaggttccttgtgcaaccactgcgcaaaggtgtatacgtacgaatgatttggagaatgttgggaaaacggctaggcaccatactttctttgagatgcttgggaactttagctttggtgattacttcaagaaagaagcgataaaatgggcatgggagctttcaactattgagtttgggctaccagctaatagagtttgggttagtatatatgaagacgatgatgaagcttttgaaatctggaagaatgaagttggtgtttctgttgagcggataaagagaatgggtgaagctgacaacttttggactagtggaccaactggtccttgtggtccatgctctgagttgtactatgacttctatcctgagagaggttatgatgaagatgttgatcttggggatgataccagatttattgagttctataatttggttttcatgcagtataacaagacggaagatggattgcttgagcccttgaaacagaagaatatagatactggtcttggtttggaacgtatagctcaaatccttcagaaggttccaaacaactacgagacagatttgatatatccaatcattgcaaagatctcagagttggcgaatatctcatatgactctgcaaatgacaaggcaaagacaagtttaaaagtgattgcagatcacatgcgggcagttgtctatctcatatcagatggtgtttctccttcaaatattggcagaggttatgtggttaggaggctaataagaagagcagttcggaaggggaagtctctcggaataaatggggatatgaatggtaatctaaagggagcgtttttgccagcggttgctgaaaaggtgatagagttgagcacttatattgattcagatgtaaaactaaaggcctcacgcatcattgaggagattaggcaagaagaacttcactttaagaaaactctggaaagaggagaaaagttacttgaccaaaagcttaacgatgcattgtcaattgctgataaaactaaggatacgccttatctggatggaaaagatgcgtttcttctttatgacacatttggctttcctgtggagataactgcagaagttgctgaagaacgtggagtcagtatagatatgaatggttttgaagtggaaatggagaatcaaagacgtcaatctcaagctgctcacaatgttgtaaaactgacagttgaagacgatgctgacatgacgaaaaatattgcagacactgagttccttggatatgacagtctctctgctcgtgctgttgtgaaaagtcttttggtgaatgggaagcctgtgataagggtttctgaaggcagtgaagtagaggttctgctggacagaactccgttctatgctgaatcaggaggtcaaattgcagatcatggttttctttatgttagcagtgatgggaaccaagagaaagctgttgttgaggtaagtgatgtgcagaagtctcttaaaatttttgttcacaagggcactgtaaaaagtggagctctagaagttggcaaggaggtggaagcagcagtagatgcagacttgaggcaacgagcgaaggttcaccataccgccactcatttgctccaatcggcacttaaaaaagtagtaggacaagaaacatcacaggctggttcattagtagcttttgaccgcctcagattcgatttcaattttaatcggtccctgcatgataatgagcttgaggaaatcgaatgcctgatcaataggtggattggggatgctacacgtcttgaaacaaaagtccttcctcttgctgatgcaaaacgtgctggagccatcgcaatgtttggggaaaaatatgatgaaaacgaggttcgtgtagtagaagttcctggtgtctccatggaactttgtggtggcactcatgttggcaatactgcagaaatacgagccttcaagattatctcagaacagggcattgcatctggaatccggcgtatagaagcggttgcaggtgaagcattcattgaatacataaactcacgggattctcaaatgacacgtctatgctcgactctcaaggtgaaagcagaggatgttacaaacagagtggagaatcttctagaggaactacgtgctgctagaaaagaagcctccgacttgcgttcaaaagcagctgtctataaagcatctgtcatatcgaacaaagcatttactgtaggaacttcacagactataagagtgctcgttgagtcgatggatgacaccgatgctgactcattaaagagtgcagctgagcatttgataagcacattggaagatccagtcgctgtggtactaggatcatctccagaaaaagacaaggttagtttagttgctgcatttagtcctggagtagtctccctaggtgttcaagcagggaaattcattggccccatagctaagctgtgtggcggaggaggtggtggaaagcccaattttgctcaggcaggcggcagaaagcctgaaaatctcccaagtgccttagagaaagctcgggaagatctcgtggcaactctatccgaaaagctagggtga

SEQ ID NO: 31 - protein, 954 aa, Arabidopsis thaliana
MGFVGFVTRTSAGVSPSILLPRSTQSPQIIAKSSSVSVQPVSEDAKEDYQSKDVSGDSIRRRFLEFFASRGHKVLPSSSLVPEDPTVLLTIAGMLQFKPIFLGKVPREVPCATTAQRCIRTNDLENVGKTARHHTFFEMLGNFSFGDYFKKEAIKWAWELSTIEFGLPANRVWVSIYEDDDEAFEIWKNEVGVSVERIKRMGEADNFWTSGPTGPCGPCSELYYDFYPERGYDEDVDLGDDTRFIEFYNLVFMQYNKTEDGLLEPLKQKNIDTGLGLERIAQILQKVPNNYETDLIYPIIAKISELANISYDSANDKAKTSLKVIADHMRAVVYLISDGVSPSNIGRGYVVRRLIRRAVRKGKSLGINGDMNGNLKGAFLPAVAEKVIELSTYIDSDVKLKASRIIEEIRQEELHFKKTLERGEKLLDQKLNDALSIADKTKDTPYLDGKDAFLLYDTFGFPVEITAEVAEERGVSIDMNGFEVEMENQRRQSQAAHNVVKLTVEDDADMTKNIADTEFLGYDSLSARAVVKSLLVNGKPVIRVSEGSEVEVLLDRTPFYAESGGQIADHGFLYVSSDGNQEKAVVEVSDVQKSLKIFVHKGTVKSGALEVGKEVEAAVDADLRQRAKVHHTATHLLQSALKKVVGQETSQAGSLVAFDRLRFDFNFNRSLHDNELEEIECLINRWIGDATRLETKVLPLADAKRAGAIAMFGEKYDENEVRVVEVPGVSMELCGGTHVGNTAEIRAFKIISEQGIASGIRRIEAVAGEAFIEYINSRDSQMTRLCSTLKVKAEDVTNRVENLLEELRAARKEASDLRSKAAVYKASVISNKAFTVGTSQTIRVLVESMDDTDADSLKSAAEHLISTLEDPVAVVLGSSPEKDKVSLVAAFSPGVVSLGVQAGKFIGPIAKLCGGGGGGKPNFAQAGGRKPENLPSALEKAREDLVATLSEKLG

SEQ ID NO: 32 - DNA, 2598 bp, Arabidopsis thaliana
  CDS (1)..(2598)
atgatatttgggagttctgaagctgcaaaacagttcttagcagagttggaaaaggcttcttctggtatagaggcacattctgatgaagcaaacatttctaacaatatgtcagataggattgatggccagattgtcaccgattctgacgaggatgtagacacagaggatgaaggtgaggagaaaatgtttgatactgcagctttggctgcgcttttgaaggcagccactggtggtggaagttcagaaggtggcaattttaccataacatctcaggatggcacgaagcttttctctatggatcgacctgctggtttgagttcatcgttaaggcccttgaagcctgcagcagctccacgtgcaaaccgttccaacatcttttccaattctaatgtcacaatggcagatgagactgagattaacttgagcgaggaagagaaacagaaattagaaaagttgcaaagcctccgtgtgaagtttttgcggcttttgcaaaggttgggtcattcggcagaagattcaattgcagcgcaggttctttaccgtcttgcactacttgctgggagacaagcagggcagttattcagtcttgatgctgcaaagaagaaggctgtggagtctgaggctgagggcaacgaagaattgatcttctccctaaacatactggtccttggaaaagccggggtgggaaaaagtgctactataaattccattttgggaaaccagattgcgtccattgatgcttttgggctctcaaccacttcggttagagaaatttctggaacggtgaatggtgtcaagattacctttattgatactccgggtttgaagtctgctgcgatggatcaaagtacaaatgcaaaaatgttgtcctctgtaaagaaggtaatgaagaagtgtccccctgatattgtactatatgtagatcgtcttgacacccagaccagggacttgaacaatttgcccttgctaaggacgattactgcttctcttggtacatccatatggaaaaacgctatagtgacattgacccatgcggcttctgcccctcctgatggcccatctggcaccccattgagctatgatgtgtttgtagcgcagtgctcacatattgtgcaacagtctataggacaggctgttggagatctacgcttgatgaatccaagtctgatgaatccagtttcacttgttgagaatcaccccttgtgtaggaagaaccgggagggagtgaaggttctcccgaatggccaaacttggagatctcagctgttgctattgtgttactccctgaaggttttgtcagaaacaaattctctattgaggcctcaagaaccattggaccatcgtaaagtatttggtttccgagttagatccccgcctctcccttacttgttgtcttggctgttgcagtcccgtgcacatcctaagctccctggagaccaaggtggtgatagtgttgactctgatatcgaaattgatgatgtgtctgattctgagcaggaagatggggaagatgatgagtatgaccagctgccaccatttaagcctcttcgaaaaacccaacttgcaaagctctcaaatgaacagagaaaggcatatttcgaggagtatgattaccgtgtaaagctcctgcagaagaagcaatggagagaggaattaaagaggatgaaagaaatgaagaaaaacgggaagaagctgggtgaaagtgagtttggttatccgggagaagaagatgatccagaaaacggggctccagctgcagtgccagttccattacccgatatggttttgccaccttcatttgatagtgataactcagcttaccgataccgatatctggaacccacttcacaactcctaaccaggccagtgttggatacccatggttgggaccatgactgtggatatgacggcgtcaatgcagaacacagtcttgctctagctagccggttccctgccacagctactgtccaagtcaccaaggacaagaaagagttcaacattcatctggactcctctgtgtctgctaagcacggggagaatggatccaccatggcagggttcgatattcagaatgtaggcaagcagctggcatatgtggtcagaggagaaaccaaattcaagaatttgaggaagaacaagacaactgttggagggtcagtgacattcttgggagagaacatcgccactggggtcaaactcgaggaccaaatagcactggggaaaaggttggtgcttgtgggcagcactgggacaatgcgatcacagggagattcggcctatggtgcgaacctcgaggtcaggcttagggaagctgatttcccaattggacaggaccaatcttcttttgggctgtctctggtaaagtggagaggcgatttagcccttggagccaatctccaatctcaagtctctgttggaaggaactcaaagattgcgcttcgtgcaggacttaacaacaagatgagcggacagatcacagtcagaaccagcagctcggatcagttgcaaatcgctctcacagccattcttccaattgccatgtccatctacaagagcattcgacccgaagcgacgaacgacaagtacagcatgtactaa

SEQ ID NO: 33 - protein, 865 aa, Arabidopsis thaliana
MIFGSSEAAKQFLAELEKASSGIEAHSDEANISNNMSDRIDGQIVTDSDEDVDTEDEGEEKMFDTAALAALLKAATGGGSSEGGNFTITSQDGTKLFSMDRPAGLSSSLRPLKPAAAPRANRSNIFSNSNVTMADETEINLSEEEKQKLEKLQSLRVKFLRLLQRLGHSAEDSIAAQVLYRLALLAGRQAGQLFSLDAAKKKAVESEAEGNEELIFSLNILVLGKAGVGKSATINSILGNQIASIDAFGLSTTSVREISGTVNGVKITFIDTPGLKSAAMDQSTNAKMLSSVKKVMKKCPPDIVLYVDRLDTQTRDLNNLPLLRTITASLGTSIWKNAIVTLTHAASAPPDGPSGTPLSYDVFVAQCSHIVQQSIGQAVGDLRLMNPSLMNPVSLVENHPLCRKNREGVKVLPNGQTWRSQLLLLCYSLKVLSETNSLLRPQEPLDHRKVFGFRVRSPPLPYLLSWLLQSRAHPKLPGDQGGDSVDSDIEIDDVSDSEQEDGEDDEYDQLPPFKPLRKTQLAKLSNEQRKAYFEEYDYRVKLLQKKQWREELKRMKEMKKNGKKLGESEFGYPGEEDDPENGAPAAVPVPLPDMVLPPSFDSDNSAYRYRYLEPTSQLLTRPVLDTHGWDHDCGYDGVNAEHSLALASRFPATATVQVTKDKKEFNIHLDSSVSAKHGENGSTMAGFDIQNVGKQLAYVVRGETKFKNLRKNKTTVGGSVTFLGENIATGVKLEDQIALGKRLVLVGSTGTMRSQGDSAYGANLEVRLREADFPIGQDQSSFGLSLVKWRGDLALGANLQSQVSVGRNSKIALRAGLNNKMSGQITVRTSSSDQLQIALTAILPIAMSIYKSIRPEATNDKYSMY

SEQ ID NO: 34 - DNA, 477 bp, Arabidopsis thaliana
  CDS (1)..(477)
atgaagaaattcaggaaaaaaaccaatgcaacaatgagtacttcgttttgtggccgggcttccatgcacatgctattgcctccccccccccccccctccccccccccctcaatttatcaaatagctttagtttgtaaattcattaacataatgttgaattgcgtttttggcggaaaaatattaaattgcattttttggcggaaaaatgtcaaatccttttcttggtcggaaatgttgaatgtcgtttttggcgggaaaatgttaaattgcgttttcggcggaaaaatattgaatatcatttttagcgggaaaatgttaaattgcgtttttgacagaaaaatgtcaactcctttttggcgggaaaatgttgaatgtcgtttttggcgggaaaatgttaaattgtgtttttggcggaaaaatgtgaaatcatttttggcggaaaatattgaatcgcgttttttggcgaaaaaattttga

SEQ ID NO: 35 - protein, 158 aa, Arabidopsis thaliana
MKKFRKKTNATMSTSFCGRASMHMLLPPPPPPSPPPSIYQIALVCKFINIMLNCVFGGKILNCIFWRKNVKSFSWSEMLNVVFGGKMLNCVFGGKILNIIFSGKMLNCVFDRKMSTPFWRENVECRFWRENVKLCFWRKNVKSFLAENIESRFLAKKF

SEQ ID NO: 36 - DNA, 1701 bp, Arabidopsis thaliana
  CDS (1)..(1701)
atggaagacgttaaccagttgttcgatgctgctttcgagttcgcacactatcccggcgctcaaaacgaaacttccgttaaggaattcctcgatcgcttccctcttcctgttatcttcaatgctttgcaaaccgatccggatataccaggatttgaaaacacgttggtgacttgcttggagaggttgtttaagactaagtatggcgcttcacttattcctcagtatatgcctgttctgcaagttggtctcaaggcagattctgcagttgtgaaatctctggcttgcaaaactgttctgtgtctcttggaggattgcgatacaaacgacgtttcttctgttcagctagttgttaacaatggcatataccctcttctacttgactatatcattaacagcgatgatgaagttgcaaatgctgcaagtgagacaattaagagcctagctcgctttccagatgcaatgtccgtaattttcccttctgaaaccaacgatcctacacatcttcgtaaccttgctgcaaggtgttcatcactggcacgagtccgggttttgtcgttgatagtgaagcttttttcgatttctcgacttgtagcttcagaagttaagaaatcggggcttcttgatttactggaggcagaaatgaagggtacaaaagacactcttgtgatcttaaatgttctggaactctactatgagatgaacgctgaagttaatggaagtggagcacagttcagagttcgtgccacaaacatcacttattcagctgttgtgttctatcatcagttttttttctctgggtcttatgttttgtatagtggtacatcgacgggaccctatgaaaagttaagagcaatgatgataagtggcagactactctcaaaggaaaatatctacaaagtcgtggaagaagctagaccagttgttccctgtctcaaagcctctgtttgttgtgcccataaaacgagtgacgaagttgaaaagttaactacgaattgctttgtttctgaatgtgtgaaggcgttaatttcagctattgatgggagtctggagtcagttgagatgaatgatactgatgcacaggaagctgccattgatgcacttggtcagatgggatcaacaacgaagggagcggatcttgtcctttcaacttcacctccagctgcaagacatgttgtagcttctgcctttgatcgtaatgcacatggaaaacagttggctgcactgcatgcactggcaaacatcgcaggtgaaacacgacctaagagcaacagaatagttgatggaaaagctgaagaaagccttagatgtttgatatacgacgctgcagcacagagcacaaaactaaccccatccggtttattcctctcagttcttcaacaaagctcagagattcgtcttgcgggttatcgaacgttaacagcattagtggctcggccatggtgcctggtggaaatcttggccaaagaagagataataaacatagttacggatgcaaccactgaaactgcaaaaatagcaatggaagcaaggtataactgctgcaaagcaattcacgaagcgttcttgtgtagtaactttgttgatgaccctcgtcgtctaaaaaccggtgacaagttgcaagaagctgttcgaagtggaccatatatgtcgaagaagcacagaggcgcacgaccagaagtaatgacaggcgaaggattttaa

SEQ ID NO: 37 - protein, 566 aa, Arabidopsis thaliana
MEDVNQLFDAAFEFAHYPGAQNETSVKEFLDRFPLPVIFNALQTDPDIPGFENTLVTCLERLFKTKYGASLIPQYMPVLQVGLKADSAVVKSLACKTVLCLLEDCDTNDVSSVQLVVNNGIYPLLLDYIINSDDEVANAASETIKSLARFPDAMSVIFPSETNDPTHLRNLAARCSSLARVRVLSLIVKLFSISRLVASEVKKSGLLDLLEAEMKGTKDTLVILNVLELYYEMNAEVNGSGAQFRVRATNITYSAVVFYHQFFFSGSYVLYSGTSTGPYEKLRAMMISGRLLSKENIYKVVEEARPVVPCLKASVCCAHKTSDEVEKLTTNCFVSECVKALISAIDGSLESVEMNDTDAQEAAIDALGQMGSTTKGADLVLSTSPPAARHVVASAFDRNAHGKQLAALHALANIAGETRPKSNRIVDGKAEESLRCLIYDAAAQSTKLTPSGLFLSVLQQSSEIRLAGYRTLTALVARPWCLVEILAKEEIINIVTDATTETAKIAMEARYNCCKAIHEAFLCSNFVDDPRRLKTGDKLQEAVRSGPYMSKKHRGARPEVMTGEGF

SEQ ID NO: 38 - DNA, 540 bp, Arabidopsis thaliana
  CDS (1)..(540)
atggcttcaatgcacgaagctctgttctcttctcggcttcttcaagtcaattcttctttttccttccgttgcgctcttccaattatctcttcaccagctgcagtatcttgcgcaatcaaatcgacccagttttttaaacagcgttgtagaaccaaagtgagggacttttctctatcttcactgtcccggagagggttcgtttgcagagctgctgagtacaagtttccggatcccatacctgaattcgccgaagctgagactgagaaatttagggaccatatgttaaacaaactatcaaaaagagatctttttgaagactctgttgatgaaattgttggagtctgcactgagatcttcgagacgttcttgcgcagtgagtatggaggacctggtacactcttggtgatacctttcattgacatggcagatactctcaacgaaagggaattgcctggaggtccacaagccgcccgagcagctattaaatgggctcaggatcatgtagacaaggactggaaggaatggaccggcactgattag

SEQ ID NO: 39 - protein, 179 aa, Arabidopsis thaliana
MASMHEALFSSRLLQVNSSFSFRCALPIISSPAAVSCAIKSTQFFKQRCRTKVRDFSLSSLSRRGFVCRAAEYKFPDPIPEFAEAETEKFRDHMLNKLSKRDLFEDSVDEIVGVCTEIFETFLRSEYGGPGTLLVIPFIDMADTLNERELPGGPQAARAAIKWAQDHVDKDWKEWTGTD

SEQ ID NO: 40 - DNA, 1116 bp, Arabidopsis thaliana
  CDS (1)..(1116)
atggcttcagtgactctaggttcatggattgttgttcaccaccacaatcatcatcatccatcttcaatccttaccaaatccagatccagatcttgtcctataactcttactaaacccatctcctttcgatcaaaacgcaccgtttcatcatcttcttcaatcgtttcttcttccgttgttacaaaagaagacaatctacgccaatctgaaccatcctctttcgatttcatgtcgtacatcatcaccaaagccgaattagtcaacaaagctttagattcagctgttcctctccgtgagccactcaagatccacgaagcgatgcgttactctcttctcgccggtggcaaaagagttagaccagttctctgcatcgctgcttgtgaactcgtcggaggtgaagaatcaaccgctatgccagcagcttgcgccgtcgagatgattcacaccatgtcgttgatccacgacgatctcccttgtatggataacgacgatctccgccgtggaaaaccgaccaaccacaaagtgtttggtgaagacgtcgctgttttagccggagacgcgcttctctctttcgctttcgagcatttagcttcggcgacgagttctgatgttgtttctccggtgagagtggttcgagccgttggagaattggctaaagcgataggaacagaagggttagtggcgggtcaagtcgtggatattagtagtgaagggttagatttaaacgacgtcggtttagagcatttggagtttatccatttgcataaaacggcggcgttgcttgaagcttctgctgttttgggagctattgttggtggaggaagtgatgatgagattgagaggttaagaaagtttgcgagatgtattggtttgttgtttcaggtggttgatgatatcttggatgtgacgaaatcgtcgaaagagttagggaaaactgctgggaaagatttgattgctgataagttgacgtatcctaagattatgggtttggagaaatcgagagagtttgctgagaaattgaatagagaggctcgtgatcagcttttagggtttgattctgataaggttgctcctttgttggctttggctaattacattgcctatagacagaactga

SEQ ID NO: 41 - protein, 371 aa, Arabidopsis thaliana
MASVTLGSWIVVHHHNHHHPSSILTKSRSRSCPITLTKPISFRSKRTVSSSSSIVSSSVVTKEDNLRQSEPSSFDFMSYIITKAELVNKALDSAVPLREPLKIHEAMRYSLLAGGKRVRPVLCIAACELVGGEESTAMPAACAVEMIHTMSLIHDDLPCMDNDDLRRGKPTNHKVFGEDVAVLAGDALLSFAFEHLASATSSDVVSPVRVVRAVGELAKAIGTEGLVAGQVVDISSEGLDLNDVGLEHLEFIHLHKTAALLEASAVLGAIVGGGSDDEIERLRKFARCIGLLFQVVDDILDVTKSSKELGKTAGKDLIADKLTYPKIMGLEKSREFAEKLNREARDQLLGFDSDKVAPLLALANYIAYRQN

SEQ ID NO: 42 - DNA, 1283 bp, Arabidopsis thaliana
  genomische Dna
atggcttcaatgcacgaagctctgttctcttctcggcttcttcaagtcaattcttctttttccttccgttgcgctcttccaattatctcttcaccagctgcagtatcttgcgcaatcaaatcgacccagttttttaaacagcgttgtagaaccaaagtgagggacttttctctatcttcactgtcccggagagggttcgtttgcagagctgctgagtacaagtttccggatcccatacctgaattcgccgaagctgtgagctcatttcctcttcttcttcaactcatttttgatggatgatcgaaacctaattgatgtgtgatataaccaggagactgagaaatttagggaccatatgttaaacaaactatcaaaaagagatctttttgaagactctgttgatgaaattgttggagtctgcactgaggtaatctcaaatcttctcaccttcactcatgtatatctgttcgtgtctatgtgagatgtcttgaattgtggtgtttttagtaattgtgttccatttcaaagaactcaaaagtggtgtaatttttagtctcagtttctgatattttcttaacatgcctcaaatctcttattcttgtgatgaatgagaatcctgatctgaaattgtttaggtaatgtaatcatcttttactgtcaatatgctagttttggaattgcaatggtgatgtttgatcgaagttttcctagtttgtatgattgtgattatgcaagcattttccttaaatcttgaggagtgattttgtggtcttggacttagtcgagcttaaggcctagaatggagagggtcatgtgattcggtttagaatgtgaaggagtggttttcaatttgaacccatcttgaaagctcagtgaaaaaaagtttgtattgtttgaaaatgagatgctgtggtcttagtaatgatgccttggtgaggatattaatctacgtatggtttacaatgagtcgactgtaagtttttgtttcatgagtgatactttaaaccccattctctaagtctgttatatgtcttggcatgagactcagggagttttaacagttttttgttctgcaccattgtgattattgacagatcttcgagacgttcttgcgcagtgagtatggaggacctggtacactcttggtgatacctttcattgacatggcagatactctcaacgaaagggaattgcctggaggtccacaagccgcccgagcagctattaaatgggctcaggatcatgtagacaaggactggaaggaatggaccggcactgattag

SEQ ID NO: 43 - DNA, 3015 bp, Arabidopsis thaliana
  genomische DNA
atgagaaatggaataaatattttatcttatccacgatttttgtcgttttgtgaggtctttgttctgctcttgtgtaacttcagcgataacccaaagttgcagacttttactcaaatgctaaactctctcttcctctcggcgcgagcttttccatctttgatcactaactcttcctctcggcgcgccaaaagttcccaatttgatcagtttagggaaaacagaggagtctctgatgctgcgattaaggttcctactgctccatggatgaaaggtcctctcttgcttcgacccgatgagattctcgacactaagaagagaaacaagccacggaaagttgaagagaagacgttcaaggcgttgaatcgtagagagagtggtgtcagaggaaagaaagcgatgaagaagatcgtgcgtaacgttgaaaagctcgatgaagatagtgattctgaagaaacccagatggatgatttgagcgaattcgagtatttaggtcgaattgaggagaaagttgagtccaaggatagatttggcgggaaaatgccatgggagagagaagaagagaggtttatattaaggaggatgaagaaggagagcgttccgactactgctgagcttattcttgacgagggattgttgaatagactgagacgtgaagcttcgaagatgagaaaatgggtgaatgtgaggaaagcaggtgttactgagttagttgtgaataagattaaatcgatgtggaagttgaatgagcttgctatggtgagatttgatgttcctctgtgtcgaaacatggagcgagctcaagagattatagaggtttggttagttctacttcatgtcaaacttgttgaatattgatgtttctttgaagtgatttctcatgttttcaacaatagatgaagactggaggcttggttgtgttaagcaagaaggagtttttagttgtttatcgaggaggaccgagttattcatcagagggacaagatgagattagctcatcattgtacgagagagaagctgataggttactggatggtttgggacctagatatatggattggtggatgagaagaccgtttcccgttgatgctgacttgcttcctgaagttgttaatggatatatgactccatctagacgttgtccaccaaacactagagctaagctaaccgatgaagagcttacctacttgagaaacattgctcaacctttaccgtttcatttcgtccttggtaatttccttcactattttagatgtctttctcactctgtgttgtgtgtgatatagagttaagcttcagggagagttattcatatgttcccgaagaaatcatgaaagaatgaggaaacttgctcaaacttgatatttttttaacaaaagatgaaacagttcttgagtagtttaaaatttttgagaagagatagatcgggaaatgtcttgctttccagaagttgcaacatttaatgtttaaactctctggctttgttcttgtcatttgcggatactatttatcgacattctcattgcgttggtattgactaagtgctgctatctttgcatttgcttgcggtttactctctcgagctctcaacagtcttttttcttcttcttaatttgcaaagggaggaactatgggcttcaaggtttagcttccgctatcgtgaaactatgggagaaatgtattattgcaaagattgcaatcaaatggggagctctcaatacaaacaatgaggaaatggcagatgaattgagggtaaatgtcttttttcttgtggccagtttttgaatatatattcattattgatgtggctgatgcgaattttttgggctctatcatattttttcagtatctcactggcggtgttctgattctacgcaacaaatacttgatagtactatacagaggcaaggacttcctttctgatgaggtcgcggatttggttgaggacagagagagattactcagcagataccaacattttgaagaaactaaacgcgagagcgatatagaactcttggaggtggtaacaaatggtaaacagttgaaggaaacaaacaaaagtggaactttattagagtttcaagaactgcaaagaaaattcggagaaatggacccgagaaacctagagactgaagctgagaaagcaagactagagaaggaactcaaaagccaagaacacaagctttccatagtaagtcttttttagcttcattgcatcttttaaaatttcgctaaggtaatataagttccatggatttgttattttcgggttttgtttgcagctaaaatcaaagatagagaaatcaaatatggagttgtttaaattaaattctttgtggaaaccatcggagggagatgatgacatcgagatattgactaatgaagaaagagaatgcttgagaagaatagggctgaagatgaacagcagcttagttcttggtaagcgccaccggatccattcttgtcttcttcttattctgtatccattgtctataagattatattacacaaatctcaatttggtatttgtttcatttgtaggtagaagaggagtcttttttggtgtaatggaaggtctacatcagcattggaagcacagggaagtagcaaaagtgatcacgatgcagaagcttttctccagagttgtctacacagcaaaagcgcttgaaacagagagcaatggagtactaatctcaatcgaaaaacttaaagaagggcacgccatactcatataccgtggcaagaactacaaacgtccttcatcgaaactgatggcacagaatcttttgacgaaaagaaaagcattgcaacgatctgttgtgatgcagcgactcggcgtaagtgaaatgaatgaaaacgtatctatctctttcatttttgattgagagaatgctctgaaccccatttgaattaatactttcattgtggcagtcactgaagttctttgcttaccagagagagagagcaatagaagatttgaaggtgagtttggtaaatcttcaagactctgctttctga

SEQ ID NO: 44 - DNA, 912 bp, Arabidopsis thaliana; identical to SEQ ID NO: 15
  CDS (1)..(912): ORF AT4g28590, Linie 305735

SEQ ID NO: 45 - protein, 303 aa, Arabidopsis thaliana; identical to SEQ ID NO: 16

SEQ ID NO: 46 - DNA, 2088 bp, Arabidopsis thaliana
  CDS (1)..(2088): ORF At2g30950, Linie 303726
atggcagcttcatcagcttgtcttgtgggaaatggtttgtcagtgaacacaacaaccaaacagaggttaagtaaacatttttccggcagacagacaagcttttcttcagtgattaggacatctaaggttaatgtagtgaaggcttctttggatgggaagaagaagcaagaaggaagaagagattttctcaaaatcttgttaggaaatgctggggtcggtttggttgcaagtgggaaagcaaatgctgatgaacaaggtgtttcttcgtcgaggatgtcgtattctaggtttctagagtacttggataaggatagggtgaataaagttgatttgtatgagaatgggactatagctattgtggaagctgtttctcctgaattgggtaaccgggttgagagagtacgtgttcagctaccgggtttaagtcaagagcttctacagaagcttagggctaagaatattgattttgcagcacataatgctcaggaagatcaaggttctgtgttattcaacttgattggtaatcttgctttcccggcgcttttgattggtggtttgttccttctttcgagacggtctggtggtggaatgggtggacctggtggtcctggtaacccacttcagtttggtcagtccaaagcaaagttccaaatggaacctaacactggtgtaacatttgatgatgttgctggagttgatgaagcaaagcaagatttcatggaagtggtggagtttttgaagaaacctgagagattcactgcggttggtgccaagatcccgaaaggtgttcttcttattggtcctcctggtaccgggaaaacccttttggcaaaagccattgctggtgaagctggtgtgcctttcttctccatctctggttctgagtttgttgagatgtttgtcggtgttggtgcctcgagagtccgtgatcttttcaagaaagccaaggagaacgctccttgcattgtctttgtagatgaaatagatgctgttggtaggcaaagaggaaccggaattggtggaggtaatgatgaaagagaacagaccctcaatcagctcctaactgagatggatggttttgaaggtaacactggtgttatcgtagttgctgcaaccaatagagcagacattcttgactctgctttgttgaggccaggacggtttgaccggcaggtaagtgttgacgttcctgacgttaaggggagaacagatattctcaaggttcatgccggcaataagaagttcgacaatgatgtttcacttgaaataatagcaatgagaacacctggatttagcggagcagatctcgctaacctcttgaatgaggctgctatattggccggaaggcgagcacggacatcgatatcatctaaagagattgatgactccattgatagaatcgttgctggcatggaaggaacagtgatgaccgatggcaagagcaaaagcttggtagcttaccatgaagttggtcatgcagtgtgtggaacattgactccaggacatgatgctgtgcaaaaggtaacgttgataccaagaggccaagcaagaggtctgacttggttcattccatcagatgacccgacactcatctccaagcagcaactctttgcaagaattgttggtggactcggtggtagggccgctgaagaaatcatctttggtgattccgaggtgactactggcgcagttggtgacttacaacagatcaccggtttggctagacagatggtaacaacatttggaatgtctgatattggaccatggtctttgatggattcttcggcacaaagcgatgtcatcatgagaatgatggcaagaaactccatgtctgagaagcttgcagaagacattgattctgcggtgaagaaactatcagacagtgcatatgagatagctctaagccacataaagaacaatcgtgaagccatggataagctcgttgaagtgcttctcgagaaagaaactattggcggtgacgaattcagggcaattctttccgagtttactgagatccccccggaaaaccgagttccttcttcaacaacgacaactccagcatcagcaccaacaccagctgctgtctaa

SEQ ID NO: 47 - protein, 695 aa, Arabidopsis thaliana
MAASSACLVGNGLSVNTTTKQRLSKHFSGRQTSFSSVIRTSKVNVVKASLDGKKKQEGRRDFLKILLGNAGVGLVASGKANADEQGVSSSRMSYSRFLEYLDKDRVNKVDLYENGTIAIVEAVSPELGNRVERVRVQLPGLSQELLQKLRAKNIDFAAHNAQEDQGSVLFNLIGNLAFPALLIGGLFLLSRRSGGGMGGPGGPGNPLQFGQSKAKFQMEPNTGVTFDDVAGVDEAKQDFMEVVEFLKKPERFTAVGAKIPKGVLLIGPPGTGKTLLAKAIAGEAGVPFFSISGSEFVEMFVGVGASRVRDLFKKAKENAPCIVFVDEIDAVGRQRGTGIGGGNDEREQTLNQLLTEMDGFEGNTGVIVVAATNRADILDSALLRPGRFDRQVSVDVPDVKGRTDILKVHAGNKKFDNDVSLEIIAMRTPGFSGADLANLLNEAAILAGRRARTSISSKEIDDSIDRIVAGMEGTVMTDGKSKSLVAYHEVGHAVCGTLTPGHDAVQKVTLIPRGQARGLTWFIPSDDPTLISKQQLFARIVGGLGGRAAEEIIFGDSEVTTGAVGDLQQITGLARQMVTTFGMSDIGPWSLMDSSAQSDVIMRMMARNSMSEKLAEDIDSAVKKLSDSAYEIALSHIKNNREAMDKLVEVLLEKETIGGDEFRAILSEFTEIPPENRVPSSTTTTPASAPTPAAV

SEQ ID NO: 48 - DNA, 2166 bp, Arabidopsis thaliana
  CDS (1)..(2166): RF F19B15.40, Linie 304249
atggcgaagaagattggagtaacgatggaagttgggaacgatggtgttgctgtcatcaccatttctaaccctcctgttaactctttagccagtccaattatttctgggttgaaggagaagtttcgtgacgccaatcaaaggaatgatgttaaggccatcgtgttgatcgggaacaatggaagattttcgggtggttttgatatcaatgtctttcagcaagttcataagactggggatttatcgcttatgcctgaagtatctgttgagcttgtgtgtaacctgatggaagactccaggaagccggttgttgctgcagttgaaggattagctcttggtggtggtttggaacttgcaatggcgtgtcatgccagagttgctgctccgaaagctcaattaggcttaccagaactgactcttggagtgattcctggttttggaggaacccaacgtcttccaaggttagtaggccttgcaaaagcaacggatatgatactgctttctaagtcaatatcctcagaagaggggcacaaactgggtctcattgatgccttggtgccacctggagatgtgttgagcacatccagaaagtgggctctagacattgcagagggacgtaaaccctttctgcagtcactgcacagaaccgacaaaattggttctttatctgaagctcgtgctatattgaagaattcaagacagctagccaagaagattgccccaaatatgcctcagcaccatgcttgcattgaggtgattgaagaaggaatcatccatggaggatacagtggggttctcaaggaagcagaagttttcaagcaactagtactgtcagacactgcaaagggtcttgttcatgttttctttgcacaacgtgcaacatcaaaagtgcctaatgtaactgacgttggattgaaaccaaggccgataaaaaaagttgcagttattggtggcggtctgatgggttcaggcatcgctacggctctacttctaagcaatataagagttgtgctcaaagaaataaactcagaattccttatgaagggaataaaatcagttgaagcaaatatgaaaagcttggtatctagggggaaactgacacaagataaagcaggaaaggccctctctttgttcaagggagtacttgattacacagaattcaatgatgtggacatggtcatagaggcagtgattgaaaacattcaattgaaacaaaacatattcaaagaaatcgaaaaggtttgttcaccccactgcattttggcgagtaatacatctactatcgacctcgatgtaattggtgaaaagactaactcaaaagatcgcattgttggcgcacatttcttcagtccggcccatctgatgccccttctcgagattgttcgttcaaagaatacttctgctcaggtgattctggatctcatggcggttggaaaggccataaagaaagttcccgtggtggttggaaactgcataggctttgcagtgaataggacattctttccttattcacaagctgcacatatgttggccaatctaggtgttgacttgttcagaattgacagcgttattacctctttcggcttgccattgggccctttccagcttggtgatttggctggacacgggattggattagcagttgggccgatatatgccaaggtctatggtgaccgcatgttcagatctccaatgacagagcttcttcttaagagcgggcgaaatggaaaaatcaacggaagaggatactatatatacgaaaagggaagcaaaccaaaacctgatccatcagtgctttcaattgttgagaaatcaaggaaactgaccaatatcatgcctggtgggaagcctatatcagtaactgataaagaaattgtagagatgatcttattccctgttgtcaacgaggcatgccgcgtcctagatgaaggagttgtgatccgagcctcagacttggacattgcgtctgtccttggaatgagttttccttcttaccggggaggaattgttttctgggcagacactgttggaccaaagtacatatatgagaggctcaagaaattgtcggagacttatggcagctttttcaaaccatcgaggtatctggaggaaagagcaatgaatggaatgcttttgagtgaatcgaaatcgtcgaggtccaaattgtga

SEQ ID NO: 49 - protein, 721 aa, Arabidopsis thaliana
MAKKIGVTMEVGNDGVAVITISNPPVNSLASPIISGLKEKFRDANQRNDVKAIVLIGNNGRFSGGFDINVFQQVHKTGDLSLMPEVSVELVCNLMEDSRKPVVAAVEGLALGGGLELAMACHARVAAPKAQLGLPELTLGVIPGFGGTQRLPRLVGLAKATDMILLSKSISSEEGHKLGLIDALVPPGDVLSTSRKWALDIAEGRKPFLQSLHRTDKIGSLSEARAILKNSRQLAKKIAPNMPQHHACIEVIEEGIIHGGYSGVLKEAEVFKQLVLSDTAKGLVHVFFAQRATSKVPNVTDVGLKPRPIKKVAVIGGGLMGSGIATALLLSNIRVVLKEINSEFLMKGIKSVEANMKSLVSRGKLTQDKAGKALSLFKGVLDYTEFNDVDMVIEAVIENIQLKQNIFKEIEKVCSPHCILASNTSTIDLDVIGEKTNSKDRIVGAHFFSPAHLMPLLEIVRSKNTSAQVILDLMAVGKAIKKVPVVVGNCIGFAVNRTFFPYSQAAHMLANLGVDLFRIDSVITSFGLPLGPFQLGDLAGHGIGLAVGPIYAKVYGDRMFRSPMTELLLKSGRNGKINGRGYYIYEKGSKPKPDPSVLSIVEKSRKLTNIMPGGKPISVTDKEIVEMILFPVVNEACRVLDEGVVIRASDLDIASVLGMSFPSYRGGIVFWADTVGPKYIYERLKKLSETYGSFFKPSRYLEERAMNGMLLSESKSSRSKL

SEQ ID NO: 50 - DNA, 1479 bp, Arabidopsis thaliana
  CDS (1)..(1479): ORF K21H1.19, Linie 304264
atgaagctctctgtgtttcgattgagctattggaaccgtcgaggaagtagtttcagatcatcgccgtcgttggatccatcattcgatggcaaatctccgtcgtctgtgttttggttcgtgattcatggtctctgctgcttgatcagcttgattctagggttccgattcagccatttagtactcttcttccttttctcgacttccgtcaccaatctatacacaacgccatttctctttgccggaaacggcggtgtaagccagcttctccggctaaaacctctggaaacagcgactaacagcacggtgaagaagaactctcgagtggtggttggaagacacgggatccggatccgtccatggcctcacccgaatccgattgaggtattgagagctcatcagttgcttgtgagagtacagaaagagcagaaatcgatgtacggtgtgaggagccctaggactgtgattgtggtgacgccgacttatgtacggacttttcaggcgcttcatttgaccggagttatgcactcgcttatgcttgttccgtacgatttggtttggatcgttgtggaagctggtggaatcactaacgagactgcttcgtttatcgcaaaatcaggattaaagacgattcacttaggattcgatcagaaaatgcctaatacatgggaagatcgtcacaaattggagaccaaaatgagacttcacgccttgagagttgtgagagagaagaagttagatgggattgttatgtttgctgatgatagcaatatgcatagtatggagctttttgatgagattcaaactgtgaaatggtttggtgctctatctgttggtatacttgctcattctggtaatgcagatgaattatcatcgatcttgaagaatgaacaagggaagaacaaagagaaaccttcaatgccaatccaaggtcctagttgtaattcctctgagaaattagtgggttggcacattttcaacacacagccttatgccaagaagactgcagtgtatatcgatgagaaagcgcctgtgatgcctagtaagatggaatggtcagggtttgtgttgaattctagattgctctggaaggaatctttagatgataaaccagcatgggttaaagatctcagcttgttggatgatggttatgcggaaattgagagtcctttgtctttggtgaaggatccttccatggtggagccacttggaagctgtggccgtcgtgtcttgctttggtggcttcgagttgaagctcgagctgatagcaaattcccacctggctggatcataaagtcacctttagaaatcacagtgccatcaaagcggacaccctggccagactcttcctcagagctcccagcggcggcgatcaaagaggcaaaaagcaactctaagccaagagtgtcgaagagcaagagctataaggagaaacaagaacctaaagctttcgatggtgtcaaagtgtcagcaactagctga

SEQ ID NO: 51 - protein, 492 aa, Arabidopsis thaliana
MKLSVFRLSYWNRRGSSFRSSPSLDPSFDGKSPSSVFWFVIHGLCCLISLILGFRFSHLVLFFLFSTSVTNLYTTPFLFAGNGGVSQLLRLKPLETATNSTVKKNSRVVVGRHGIRIRPWPHPNPIEVLRAHQLLVRVQKEQKSMYGVRSPRTVIVVTPTYVRTFQALHLTGVMHSLMLVPYDLVWIVVEAGGITNETASFIAKSGLKTIHLGFDQKMPNTWEDRHKLETKMRLHALRVVREKKLDGIVMFADDSNMHSMELFDEIQTVKWFGALSVGILAHSGNADELSSILKNEQGKNKEKPSMPIQGPSCNSSEKLVGWHIFNTQPYAKKTAVYIDEKAPVMPSKMEWSGFVLNSRLLWKESLDDKPAWVKDLSLLDDGYAEIESPLSLVKDPSMVEPLGSCGRRVLLWWLRVEARADSKFPPGWIIKSPLEITVPSKRTPWPDSSSELPAAAIKEAKSNSKPRVSKSKSYKEKQEPKAFDGVKVSATS

SEQ ID NO: 52 - DNA, 2550 bp, Arabidopsis thaliana
  CDS (1)..(2550): ORF At2g15820, Linie 304485
atgacaaaatccaacggccacaatgcaacaatgattgttaccggagcttgcgacttctcttcatcattctccctcgcctcttcctcctcctccaccgtctccgtcacaaccttcaacatttcctctctttcctctaaccccaacatcatcaattccagctcaactctcttccgttccctttccttctcccttatccgccaccgcagcagctactcacgtcgctctctccgccgtctctctatccacacagttcatggaaacaaaacccaattcttctctcactcgtctacacgaactccaccacttttcacggctaattccacagcccaacgaagcgggactttcgtcgaacaccttacaggcattacagaatcggaagaaggaatcagcgaagccaacggtttcggtgatgtagagtctgctaggaacgacataagaaacgtcgcgactcgtagaatagagacggagtttgaagttagagaattggaagagttgcctgaggaatggcgacgctcgaagctagcttggctgtgtaaagaggttccaacgcataaggccgtgacgcttgtgagactcttgaatgctcagaagaaatgggttcgtcaagaggacgctacttacatctctgttcattgtatgcgaattcgtgagaacgaaactggattcagggtgtatagatggatgacacaacagaattggtaccggtttgatttcgggttaacgacgaagctagctgaatacttggggaaagaacggaaatttacgaaatgtcgagaggtatttgatgatgttttgaatcaaggacgtgtaccaagtgaatctacatttcatattcttgtagttgcgtatctaagtagcttatcagtagaaggttgtctcgaggaagcgtgtagtgtttacaatagaatgattcaacttggaggttacaaaccgcgtcttagtctgcataactctttgtttagagctttggttagtaaacaaggagggattctgaatgatcagcttaagcaagcagagtttatctttcacaatgttgtgacaaccgggcttgaggttcagaaggatatttatagtggattgatctggctgcatagttgtcaagatgaagttgatataggtaggataaactctctaagagaagagatgaagaaggccggttttcaggagagtaaagaagttgtggtatcgttacttagagcttatgcaaaggagggaggtgtggaagaagttgagaggacgtggcttgaattgcttgatttagattgtggtataccttctcaggcgtttgtgtacaaaatagaagcttattcgaaagtcggcgattttgcgaaagctatggagatatttagggagatggagaagcatataggtggtgcaactatgtctggataccataaaatcattgaggttctatgtaaagtccaacaagtggaacttgtggaaactctcatgaaggagtttgaagaaagcgggaagaagccgcttctaccatcattcatcgaaatagccaaaatgtacttcgatttgggtttacatgagaaattggagatggcttttgttcagtgcttggagaaatgccaacctagccagcctatatataacatatatttggattcattgactaaaataggcaaccttgagaaagcaggggatgtcttcaatgaaatgaaaaacaacgggacaatcaatgtgagtgctagatcctgcaacagccttttaaagggatacctagattgtggaaaacaagtgcaggcagagagaatatatgatctgatgagaatgaagaaatacgaaatcgaaccaccgcttatggaaaagcttgattacatcctgagcttgaagaaaaaagaggtgaagaagagaccgtttagcatgaagctaagcaaagaccagcgtgaggtattggtaggtttgttgttaggtggcttgcaaatcgaatcagacaaagagaagaagagccacatgatcaaatttgaatttagagaaaattctcaagctcatctggttcttaaacaaaacatacatgaccagttccgtgagtggttgcatcctttgagcaattttcaggaggatattataccgttcgaattctactccgttccccattcatacttcgggttttacgctgaacattactggccaaagggtcagccagagattccaaaactgattcatcggtggctatcgccacactcactcgcgtattggtacatgtacagcggcgttaaaacatcatcaggagacattatcttgagattgaagggaagtctcgaaggtgttgagaaagtagtaaaggctcttcaagccaaatctatggaatgtcgagttaagaagaaaggaaaagtcttctggattggacttcagggaacaaactcagctttgttctggaaactaatagagcctcatgtgttagagaacttgaaagagcatttgaaacctgcttctgaatcactggacaatgttaaggaagcagaagaacaaagcatcaacttcaaatcaaactctgatcacagtgacgattgtgtcaattcagaagcacatttttactga

SEQ ID NO: 53 - protein, 849 aa, Arabidopsis thaliana
MTKSNGHNATMIVTGACDFSSSFSLASSSSSTVSVTTFNISSLSSNPNIINSSSTLFRSLSFSLIRHRSSYSRRSLRRLSIHTVHGNKTQFFSHSSTRTPPLFTANSTAQRSGTFVEHLTGITESEEGISEANGFGDVESARNDIRNVATRRIETEFEVRELEELPEEWRRSKLAWLCKEVPTHKAVTLVRLLNAQKKWVRQEDATYISVHCMRIRENETGFRVYRWMTQQNWYRFDFGLTTKLAEYLGKERKFTKCREVFDDVLNQGRVPSESTFHILVVAYLSSLSVEGCLEEACSVYNRMIQLGGYKPRLSLHNSLFRALVSKQGGILNDQLKQAEFIFHNVVTTGLEVQKDIYSGLIWLHSCQDEVDIGRINSLREEMKKAGFQESKEVVVSLLRAYAKEGGVEEVERTWLELLDLDCGIPSQAFVYKIEAYSKVGDFAKAMEIFREMEKHIGGATMSGYHKIIEVLCKVQQVELVETLMKEFEESGKKPLLPSFIEIAKMYFDLGLHEKLEMAFVQCLEKCQPSQPIYNIYLDSLTKIGNLEKAGDVFNEMKNNGTINVSARSCNSLLKGYLDCGKQVQAERIYDLMRMKKYEIEPPLMEKLDYILSLKKKEVKKRPFSMKLSKDQREVLVGLLLGGLQIESDKEKKSHMIKFEFRENSQAHLVLKQNIHDQFREWLHPLSNFQEDIIPFEFYSVPHSYFGFYAEHYWPKGQPEIPKLIHRWLSPHSLAYWYMYSGVKTSSGDIILRLKGSLEGVEKVVKALQAKSMECRVKKKGKVFWIGLQGTNSALFWKLIEPHVLENLKEHLKPASESLDNVKEAEEQSINFKSNSDHSDDCVNSEAHFY

SEQ ID NO: 54 - DNA, 339 bp, Arabidopsis thaliana
  CDS (1)..(339): ORF ATF12B17_20, Linie 304652
atgtcaggagtttgggtgttcaataacggagtgatacgtctagtggagaacccgaaccagtccggtggagtttccacacagtcgcacggccggagaaatgtcttggtttacttgccgaccggtgaagccgtctcatcttactcgtcgctcgaacaaatcctaaggagcctcgggtgggaaagatacttcagtggagactccgatctcatccagtaccacaaacgctcctccatcgacctcatctccttaccaagagacttctccaagttcaactccgtttacatgtacgacatcgttgtcaagaaccctaattccttccacgtccgcgatttcaattga

SEQ ID NO: 55 - protein, 112 aa, Arabidopsis thaliana
MSGVWVFNNGVIRLVENPNQSGGVSTQSHGRRNVLVYLPTGEAVSSYSSLEQILRSLGWERYFSGDSDLIQYHKRSSIDLISLPRDFSKFNSVYMYDIVVKNPNSFHVRDFN

SEQ ID NO: 56 - DNA, 2415 bp, Arabidopsis thaliana
  CDS (1)..(2415): ORF ATF12B17_10, Linie 304652
atgtcaggagtttgggtgttcaataacggagtgatacgtctagtggagaacccgaaccagtccggtggagtttccacacagtcgcacggccggagaaatgtcttggtttacttgccgaccggtgaagccgtctcatcttactcgtcgctcgaacaaatcctaaggagcctcgggtgggaaagatacttcagtggagactccgatctcatccagtaccacaaacgctcctccatcgacctcatctccttaccaagagacttctccaagttcaactccgtttacatgtacgacatcgttgtcaagaaccctaattccttccacaaacaaacgatgcctcgtaaaggattatccaatttcgatgattatgatgatggttttgatgatgatgacgatgcttttgattatgactatgatgttgatatagatgaacatgaagaagaagctgctgctgaaccaaaggaagaaattgctaaaacgcaagggctttggcgatgtgctatctgtacatatgacaatgttgagactatgtttgtgtgtgatatctgcggtgttcttcgtcatcctgtcgccggaaatcaaagtatcaataagaatacagctgttcgtgttgtgagtctctttgcaattgtggtgttgcaaaggcgttattctgacagttccttttcaacttatgtagcacctttcaagtttgatgctccatcgccagatgatttagtctccaatggactaacatcctcaaaaactggtccaaaaggctcaggtgatgctagcatgagacagaaggagaagcaagatagcgtagaacagaaacctttaaagaaaggaggagatagttcagaaacaagctcccgaggtagacatgataaacttgatgataagggcggtgctggcggcataaaatcaggcaaaagtttgccaaaagcaaaagcagatatgtctaatgagacaagttcgtcctctaaatatatggagacgtcggagagtcttactggtactatgaacaagatgtctttgattggggaaacagaaaactctagcgatattaaaattagaggaccaaaatcacaatctaagcataagccagaggagtggatgcttcttgataaagaatcagatgcactaagccagcttaatcttgccatcgtggggcatgttgattccggtaagtctacactttcgggtagattattgcatcttttgggaagaatatcgcagaagcaaatgcacaagtatgagaaagaagcaaagttgcagggcaaagggtcctttgcatatgcctgggcattggatgagagtgctgaagagagggaacgaggaataacaatgactgtggctgttgcttatttcaattccaaaagacatcatgttgttttgctcgactctcctggacacaaagattttgttccaaacatgatagcaggagcaacacaagcagatgctgcgattcttgtcatagatgcatctgttggtgcttttgaagctggttttgataatttgaaagggcagacaagggagcatgcacgggttctgagaggttttggcgtggagcaagtcatagttgcaatcaacaaaatggatattgttggctactcaaaggaaagatttgatttgattaagcagcacgttggatcttttttgcaatcctgtcgttttaaggattcttctctgacatggattccattaagtgccatggaaaaccaaaacttggtggcagctccctctgataaccgcctatcctcatggtatcaaggtccatgtttattggatgccgtcgactctgtcaagtctcctgatagagacgtctcaaagcctctactcatgcctatatgtgacgctgtaagatcaacttcgcaagggcaggtatctgcatgtggcaaacttgaagctggagctgtccggccaggatctaaggtaatggttatgccatcaggagatcaaggaaccatacgatcactagagcgtgactctcaggcttgcaccattgcaagagctggagataacgtagcgttagcgttgcaagggatcgatgcaaatcaagtaatggcaggagatgtattgtgccatcctgatttccctgtatcagtagcaactcatttggaattgatggtgctcgtcttggaaggcgcaacaccgatcttgctcggttctcagttggagtttcatgtgcatcatgcaaaggaagcagcaacagttgtgaaacttgtggcaatgcttgatcccaaaacagggcagccaacaaagaagtctcctcgttgtctaactgctaaacagagcgcaatgcttgaggttagtctccaaaatccagtatgtgtggagacattttctgagagtagagctcttggaagagtgttccttagatcatcgggaagaactgttgctatgggcaaagttactcggattatccaagactcataa

SEQ ID NO: 57 - protein, 804 aa, Arabidopsis thaliana
MSGVWVFNNGVIRLVENPNQSGGVSTQSHGRRNVLVYLPTGEAVSSYSSLEQILRSLGWERYFSGDSDLIQYHKRSSIDLISLPRDFSKFNSVYMYDIVVKNPNSFHKQTMPRKGLSNFDDYDDGFDDDDDAFDYDYDVDIDEHEEEAAAEPKEEIAKTQGLWRCAICTYDNVETMFVCDICGVLRHPVAGNQSINKNTAVRVVSLFAIVVLQRRYSDSSFSTYVAPFKFDAPSPDDLVSNGLTSSKTGPKGSGDASMRQKEKQDSVEQKPLKKGGDSSETSSRGRHDKLDDKGGAGGIKSGKSLPKAKADMSNETSSSSKYMETSESLTGTMNKMSLIGETENSSDIKIRGPKSQSKHKPEEWMLLDKESDALSQLNLAIVGHVDSGKSTLSGRLLHLLGRISQKQMHKYEKEAKLQGKGSFAYAWALDESAEERERGITMTVAVAYFNSKRHHVVLLDSPGHKDFVPNMIAGATQADAAILVIDASVGAFEAGFDNLKGQTREHARVLRGFGVEQVIVAINKMDIVGYSKERFDLIKQHVGSFLQSCRFKDSSLTWIPLSAMENQNLVAAPSDNRLSSWYQGPCLLDAVDSVKSPDRDVSKPLLMPICDAVRSTSQGQVSACGKLEAGAVRPGSKVMVMPSGDQGTIRSLERDSQACTIARAGDNVALALQGIDANQVMAGDVLCHPDFPVSVATHLELMVLVLEGATPILLGSQLEFHVHHAKEAATVVKLVAMLDPKTGQPTKKSPRCLTAKQSAMLEVSLQNPVCVETFSESRALGRVFLRSSGRTVAMGKVTRIIQDS

SEQ ID NO: 58 - DNA, 1461 bp, Arabidopsis thaliana
  CDS (1)..(1461): ORF F24P17.10, Linie 304656
atggcgtcaatgtctctctccttttcttcttcgctatgttcatccagaatccccgaaggtaagcgtaggtttcgtcacagagatgtgggcatcgttagatgcgttttggctgcttcgaaatcttctccgggaagtgttacgaagaagaggctttggaaagacggcgaattccccggaatcacggagccggttaatcagagaagaactccgataaagaatgtgaagaagaaacttgacaggagaagcaaagctaacggatgggttaacaccgtcactgaaactttgtccgatctcatcgccaaaaagcagtggttacaagctctcgaggtttttgatatgttgagggaacaaacattttatcaaccaaaggaaggaacttacatgaagctgcttgttcttctcggtaaatctggtcaacccaatcgtgcacagaagctgttcgacgaaatgcttgaagaaggacttgaaccaactgttgaactctacactgctcttctcgctgcttacactcgcagcaatctcatcgacgatgctttttcaattcttgataaaatgaaaagctttcctcaatgccaacctgatgttttcacgtacagcactctgctcaaggcttgtgtggatgcttctcagtttgacttggtggattcgttatacaaggaaatggacgagcgtttgataactccaaacactgtgacccagaacatagttttaagtgggtacggtagggtcggaaggtttgatcagatggagaaagttttgtctgatatgttggtgagtactgcttgcaaacccgatgtgtggactatgaatatcatccttagtgtgtttggaaacatgggtaagatagacatgatggagagctggtacgaaaagttcaggaactttgggattgagccagagactcggactttcaatattttgattggttcttatgggaagaagagaatgtatgataagatgtcgtctgtcatggaatacatgcgaaagctagagtttccgtggacaacatcaacctacaacaatatcatcgaggcgtttgcggatgttggtgatgcaaagaacatggagttgacatttgatcagatgcgtagcgaaggtatgaaagcagacacaaagaccttttgctgtctcataaacggatatgccaatgccggtcttttccacaaggtgataagtagtgttcagttggctgctaagtttgagatacccgagaatactgccttttacaacgcggtgatatcagcgtgtgctaaagcagatgatctgatagagatggaaagagtgtacataagaatgaaggagagacaatgcgtatgcgattcaagaacgtttgagatcatggtcgaggcgtatgaaaaagaaggtatgaatgataagatctattacttggaacaagagaggcaaaagcttatggatcgcactgttgctacaaaagagatggagaatcttccggcaggatga

SEQ ID NO: 59 - protein, 486 aa, Arabidopsis thaliana
MASMSLSFSSSLCSSRIPEGKRRFRHRDVGIVRCVLAASKSSPGSVTKKRLWKDGEFPGITEPVNQRRTPIKNVKKKLDRRSKANGWVNTVTETLSDLIAKKQWLQALEVFDMLREQTFYQPKEGTYMKLLVLLGKSGQPNRAQKLFDEMLEEGLEPTVELYTALLAAYTRSNLIDDAFSILDKMKSFPQCQPDVFTYSTLLKACVDASQFDLVDSLYKEMDERLITPNTVTQNIVLSGYGRVGRFDQMEKVLSDMLVSTACKPDVWTMNIILSVFGNMGKIDMMESWYEKFRNFGIEPETRTFNILIGSYGKKRMYDKMSSVMEYMRKLEFPWTTSTYNNIIEAFADVGDAKNMELTFDQMRSEGMKADTKTFCCLINGYANAGLFHKVISSVQLAAKFEIPENTAFYNAVISACAKADDLIEMERVYIRMKERQCVCDSRTFEIMVEAYEKEGMNDKIYYLEQERQKLMDRTVATKEMENLPAG

SEQ ID NO: 60 - DNA, 996 bp, Arabidopsis thaliana
  CDS (1)..(996): ORFs K1L20.13, Linie 302192
atggcaggatttttctcgttaggacacggcggaggaggaaacactccagacaaccacagaacaaacactaataatccttcttcatcgggaacagaatcttggctttggtgcagaaaccctaactctaacgctgacggtggagaagctggtccttcttacaaaggaacccttgagctatggcaacacccaaacaatcaagaaatcattttccagcagcagcagcaacagcaacaaaggctggatctttacacttccgctgcgggtttaggtgttggaccgagcaaccggagcttaattgaaacttccggcggtgcgttgatgatgatgagaagcggtagcggtagcggcggaccaagctgccaggattgtgggaatcaatctaagaaagactgctctcacatgagatgtaggacttgctgcaagagccgtggccttgactgtcccactcacgtgaagagcacgtgggttcctgccgctaaacgccgagaacgccagcagcagctttctaccggtcagcaaccgcagcaactgggagggagcgtccctaaacgacagagagagcgtatcccggcgagatcgacttccatggcctacactcgtataccttctaacaacacttcagggttggaggttgggaattttccgccggaagttagctcgtcggcagtttttcggtgcgtgcgtgtgagttccgtagatgatgaagaagaagagtatgcatataaaacagctgtgagtataggcggtcacgtcttcaaaggtgttctctacgatcaaggcccggccgagagaagctcctcgggcggtggatctcagccgttgaatctcataaccgcaggcccatcggcctcatcatcaagcccaaacgtgagctgcaacaatggagtcgttggctccacttcagatcattatatcgatcctgcctcacttaattatcctactcccattaacactttcatgactggtacgcacttcttctccaactcaagatcttga

SEQ ID NO: 61 - protein, 331 aa, Arabidopsis thaliana
MAGFFSLGHGGGGNTPDNHRTNTNNPSSSGTESWLWCRNPNSNADGGEAGPSYKGTLELWQHPNNQEIIFQQQQQQQQRLDLYTSAAGLGVGPSNRSLIETSGGALMMMRSGSGSGGPSCQDCGNQSKKDCSHMRCRTCCKSRGLDCPTHVKSTWVPAAKRRERQQQLSTGQQPQQLGGSVPKRQRERIPARSTSMAYTRIPSNNTSGLEVGNFPPEVSSSAVFRCVRVSSVDDEEEEYAYKTAVSIGGHVFKGVLYDQGPAERSSSGGGSQPLNLITAGPSASSSSPNVSCNNGVVGSTSDHYIDPASLNYPTPINTFMTGTHFFSNSRS

SEQ ID NO: 62 - DNA, 2265 bp, Arabidopsis thaliana
  CDS (1)..(2265): ORF F4P12_400, Linie 302636
atggctttctcttcatgtctcaaattctatccattttctatctctcaagctgtaaccctaactcatcattccttctctctcaatctaactcctccttcttctaccatctccttcgcttctcctcactcagcagctctctcctctaccgatgtcaagcttctcgactcactccgtagccagcctgatgattccgccgcacttcgtctctttaatctggcctctaagaagccaaatttctcacctgaacctgctctatacgaagagattctccttcggctaggtcggtctggttcgtttgatgacatgaagaaaattcttgaagacatgaagagttccagatgcgaaatgggtacttctactttcttgatattaatcgagagttatgctcagttcgaattgcaagatgagattttaagtgttgttgattggatgattgacgaattcgggttaaaacccgatacccatttttataaccggatgttgaatcttctcgttgatgggaatagtctgaaactcgttgagatttctcacgcgaagatgagtgtctgggggattaaaccagatgtatctacgtttaatgttttgatcaaagctttgtgtagagctcatcagcttagacctgcgattttgatgttggaggatatgcctagttacggtcttgttcctgatgagaagacatttacaacggttatgcaaggctatattgaagaaggggacttggatggagctttgaggattagggaacagatggttgagtttggttgttcatggtctaatgtgagtgttaatgttattgttcatggtttttgtaaggaagggagagtcgaagacgctctcaatttcattcaggagatgtctaatcaagacgggttttttccggatcagtacacgtttaatacgttagttaatggtttgtgtaaagcagggcatgtgaagcatgctattgagattatggatgtgatgcttcaagaagggtatgatccagatgtgtatacttataactcggtgatttcgggtttgtgtaagcttggagaggtgaaagaagcagtggaggttcttgatcagatgattactagagattgttctccgaacacggttacttacaacactttgatcagcacgttatgtaaagagaatcaggtcgaggaagctacggagcttgcccgtgttctcaccagcaaagggatccttcctgacgtttgtacatttaactctttgatccaaggtttgtgtttgactaggaatcaccgggttgcgatggagttgtttgaagagatgaggagcaaaggatgtgagcctgacgagttcacttacaatatgctgattgatagcttatgctccaaagggaagctagatgaagctctgaacatgcttaaacaaatggaattgagtggttgtgcacggagtgtgataacttacaacactttgattgatgggttttgcaaagccaacaagactagagaagccgaggagatatttgatgagatggaagtacatggagtttcaagaaactctgttacatacaacacactcatcgatgggctttgtaaaagcaggcgagtagaggacgcggctcagctcatggatcaaatgattatggaaggacagaaacctgacaagtacacatacaactcgcttttaacacatttctgcagaggaggtgacataaagaaagctgcggatatcgtgcaagccatgacctcaaatgggtgtgaaccagacattgtgacctatggaaccttgataagcggtttgtgtaaagctggtagagttgaagttgcaagtaagcttttgaggtcaattcagatgaaagggattaatttgacaccgcatgcttataatccggtgattcaagggttgtttagaaagaggaaaacaacagaagctataaatttgtttagagaaatgcttgaacagaatgaagctccaccagatgcagtatcctacagaatcgttttccgtgggctatgtaatggaggtggaccaatccgtgaagcagtggactttcttgttgagctgttagagaaaggatttgtacctgagttttcttctttgtacatgttggctgaaggtcttctcactttgtcaatggaagaaacactagtcaagttagtgaacatggtgatgcagaaagctagattctcggaggaagaggtttcaatggtgaaaggtttgcttaaaatcaggaaatttcaggacgctttggccactcttggcggcgtcttggacagtcgccagccgaggagaacctaccggtcaagatga

SEQ ID NO: 63 - protein, 754 aa, Arabidopsis thaliana
MAFSSCLKFYPFSISQAVTLTHHSFSLNLTPPSSTISFASPHSAALSSTDVKLLDSLRSQPDDSAALRLFNLASKKPNFSPEPALYEEILLRLGRSGSFDDMKKILEDMKSSRCEMGTSTFLILIESYAQFELQDEILSVVDWMIDEFGLKPDTHFYNRMLNLLVDGNSLKLVEISHAKMSVWGIKPDVSTFNVLIKALCRAHQLRPAILMLEDMPSYGLVPDEKTFTTVMQGYIEEGDLDGALRIREQMVEFGCSWSNVSVNVIVHGFCKEGRVEDALNFIQEMSNQDGFFPDQYTFNTLVNGLCKAGHVKHAIEIMDVMLQEGYDPDVYTYNSVISGLCKLGEVKEAVEVLDQMITRDCSPNTVTYNTLISTLCKENQVEEATELARVLTSKGILPDVCTFNSLIQGLCLTRNHRVAMELFEEMRSKGCEPDEFTYNMLIDSLCSKGKLDEALNMLKQMELSGCARSVITYNTLIDGFCKANKTREAEEIFDEMEVHGVSRNSVTYNTLIDGLCKSRRVEDAAQLMDQMIMEGQKPDKYTYNSLLTHFCRGGDIKKAADIVQAMTSNGCEPDIVTYGTLISGLCKAGRVEVASKLLRSIQMKGINLTPHAYNPVIQGLFRKRKTTEAINLFREMLEQNEAPPDAVSYRIVFRGLCNGGGPIREAVDFLVELLEKGFVPEFSSLYMLAEGLLTLSMEETLVKLVNMVMQKARFSEEEVSMVKGLLKIRKFQDALATLGGVLDSRQPRRTYRSR

SEQ ID NO: 64 - DNA, 2157 bp, Arabidopsis thaliana; identical to SEQ ID NO: 28
  CDS (1)..(2157): ORF T21H19_100, Linie 302894

SEQ ID NO: 65 - protein, 718 aa, Arabidopsis thaliana; identical to SEQ ID NO: 29

SEQ ID NO: 66 - DNA, 486 bp, Arabidopsis thaliana
  CDS (1)..(486): ORF At5g24315, Linie 305146
atggcttccttcacctgttcttctccatcttcgattttacctattattgatacgagaagtgggaatttgcgatgcacatttcagtctcaggtttcttgtgggattcagagagatgataatggacgccgtgtttggcggaggagaacattgacgaagaaggacgatatgttgcgttacaaaatgcaaagagttccatttgtggaagaacaagtaaggaagataagagaagttgggaaggtaatgacaatggacatagagcagcttcttttgagggaagacaatcggtttgaatttgtcaatagcgtagcagctgaagcaacagagtacgtggacaagaacagagacgaatatggaggttccaaaaaagccatctttcatgttctaagcaaccgtgtgaacgatctcggctttgatcgccctgaggcttatgtagaagctgatccttacaaacccggtcctggctatttgttggagtactacacttga

SEQ ID NO: 67 - protein, 161 aa, Arabidopsis thaliana
MASFTCSSPSSILPIIDTRSGNLRCTFQSQVSCGIQRDDNGRRVWRRRTLTKKDDMLRYKMQRVPFVEEQVRKIREVGKVMTMDIEQLLLREDNRFEFVNSVAAEATEYVDKNRDEYGGSKKAIFHVLSNRVNDLGFDRPEAYVEADPYKPGPGYLLEYYT

SEQ ID NO: 68 - DNA, 1260 bp, Arabidopsis thaliana
  CDS (1)..(1260): ORF T20010_10, Linie 305156
atgaatagctcgatgacgacgagtccaacggctcgagccttccttcatcttcactcgtcaccattcactttacgttcgagaaagtcaccgtctggagtttgtctagtctcgtggccgccttctcggtctcgcaggactcgacgactcgtttgtatggccgaaccttacctcattaggaaaatggagtctgttgagaagacatggaaggagttatcggtgaaactagctgacccagatgttgtttcgaatcaatctgaataccaaaaactggcacaatccatgtcggagcttgacgaggttgtaacagtcttcagaagattcaaggactgtgagaagcagttactagaaagcaaagttttggcgaaagaggctggagatgatgaagatatggctgaaatgataggaagtgaaatcaactcgctcactaaagaaattgaggagcttgaaaaacaacttaaggtgttacttcttccttccgatcctcttgatgccagaaacattttgcttgaagttagagcaggaactggtggcgatgaagctgcaatttggactggtgaccttgtaggtgcggatgtatcagaggtacagcgagcgcagctcttggaagttttcaatggtttcatgctcagaggttacaagacgtgtgtgatggagattaaaggaaatcgtgtctatagcaagctcaagtatgaatctggtgttcatcgagtccagcgtgttcctcaaacagaaacacagggtcgtgtacacacttctacagcaactgtagccatcatgccagaggctgatgaagtggaagtggtgattgacccaaaggacattgaacttacatctgcaagatctggcggcgctggaggccaaaatgtgaacaaggtggagacggctatagatctattccacaaaccgtcaggtattcgcattttctgtacagaagaaaggacccagattaggaataaggcgcgtgctttccagcttctgcgagcaaaactgtatgaaataaaagtaagggaacaacaagagaagataaggaatgaaaggaaatctcaggttgggactggagctcgttcagaaaagataagaacatacaattataaggacagtagagtgactgatcataggctaaagatgaactttgcgcttacaacatttcttgacggtgctttagaggacgcagtgcaggcttgtgctgctttggagcaaaaggaactcatggaagaactctccgagtctgtagctgcttcttctgctacttctggataa

SEQ ID NO: 69 - protein, 419 aa, Arabidopsis thaliana
MNSSMTTSPTARAFLHLHSSPFTLRSRKSPSGVCLVSWPPSRSRRTRRLVCMAEPYLIRKMESVEKTWKELSVKLADPDVVSNQSEYQKLAQSMSELDEVVTVFRRFKDCEKQLLESKVLAKEAGDDEDMAEMIGSEINSLTKEIEELEKQLKVLLLPSDPLDARNILLEVRAGTGGDEAAIWTGDLVGADVSEVQRAQLLEVFNGFMLRGYKTCVMEIKGNRVYSKLKYESGVHRVQRVPQTETQGRVHTSTATVAIMPEADEVEVVIDPKDIELTSARSGGAGGQNVNKVETAIDLFHKPSGIRIFCTEERTQIRNKARAFQLLRAKLYEIKVREQQEKIRNERKSQVGTGARSEKIRTYNYKDSRVTDHRLKMNFALTTFLDGALEDAVQACAALEQKELMEELSESVAASSATSG

SEQ ID NO: 70 - DNA, 822 bp, Arabidopsis thaliana
  CDS (1)..(822): ORF C7A10.610, Linie 304044
atggggaaaggaggaggttgtgttccgagcaagaagaagaagccggccaccaccggcgatggtcccggaatcgatgatgataacgacgctactaatgctccgatccaaattgacgatgatcaaaccaccattgacggcgatcgaacaacggcgacgaatactggaggaacaacaacaccagcgattactactacggctgctaagatctcgtcaccgctcaagatcttcgtcgtgttctattcgatgtacggacatgtggagagcttagcgaagaggatgaaaaagggagtggatagcgtcgaaggagtggaggcgacgttgtacagagttccggagacgctttcgcaggaggttgttgagcagatgaaggcgccggttaaggatttggagattccggagattacggcggcggaattgacggcggctgatggatttctgtttggatttccgactaggtatggttgtatggctgcgcagatgaaggcgttttttgattcgacgggatcattgtggaaggagcagagtcttgctggtaagcctgctggattctttgtgagcactggcactcaaggaggtggccaagagaccactgcatggacagcaatcacacagcttgtgcaccatgggatgctatttgtaccaataggctacacatttggagctggaatgttcaagatggactcgatacgtggaggctctccttatggagcaggtgtgttcgctggtgatgggtcaagagaagcaacagaaacagaattggctcttgctgaacatcaaggaaactacatggctgcaatagtcaaaagacttgctcaaccttaa

SEQ ID NO: 71 - protein, 273 aa, Arabidopsis thaliana
MGKGGGCVPSKKKKPATTGDGPGIDDDNDATNAPIQIDDDQTTIDGDRTTATNTGGTTTPAITTTAAKISSPLKIFVVFYSMYGHVESLAKRMKKGVDSVEGVEATLYRVPETLSQEVVEQMKAPVKDLEIPEITAAELTAADGFLFGFPTRYGCMAAQMKAFFDSTGSLWKEQSLAGKPAGFFVSTGTQGGGQETTAWTAITQLVHHGMLFVPIGYTFGAGMFKMDSIRGGSPYGAGVFAGDGSREATETELALAEHQGNYMAAIVKRLAQP

SEQ ID NO: 72 - DNA, 774 bp, Arabidopsis thaliana
  CDS (1)..(774): ORF At2g21160, Linie 140412
atgaatcttagggttttgttcctcgctctccttctccttgcatctcctctgcttcaagttgctagatgtcaatcggatgccgaggatcattcaagtcttgttgacgatgttgtgggagaaaacactgatgatgcggttgaggaagatgaccatgatttggatatgaacttgtcctcatttccaggagttgagactgtttgtgttttccccaaaaacagtgccaaattggttccagctggagaagagactgagctccttgttggtcttaaaaatgaagggaaaactagagtaggtgtgatgggaattagggccagcgttcatcttccttatgatcataagttgttggttcagaatctaaccatgttgagacttaacaatgcatccatcccaacgtctcttcaagcaacattcccatacatctttgcagtcagccagtacttgcagcctggagcatttgatctggtgggttatatcatatacgatgtggaaggaaagccataccagagtgtcttctacaatggaaccatagaggtagttgaatctggaggtcttctcagcggcgaatctgttttccttttaacactcggaatcggtctcctcctcctcctcggtctatgggcatacagccaagttcagcgtctcaccaagaaaaccaaaaaggtttccaaggtggaagtaggaactaggtctaccgaggcatcactcgatgaatggctcgagggaactactttggccaagacatcgtctgggaaaacaaagaacaagaagaactaa

SEQ ID NO: 73 - protein, 257 aa, Arabidopsis thaliana
MNLRVLFLALLLLASPLLQVARCQSDAEDHSSLVDDVVGENTDDAVEEDDHDLDMNLSSFPGVETVCVFPKNSAKLVPAGEETELLVGLKNEGKTRVGVMGIRASVHLPYDHKLLVQNLTMLRLNNASIPTSLQATFPYIFAVSQYLQPGAFDLVGYIIYDVEGKPYQSVFYNGTIEVVESGGLLSGESVFLLTLGIGLLLLLGLWAYSQVQRLTKKTKKVSKVEVGTRSTEASLDEWLEGTTLAKTSSGKTKNKKN

SEQ ID NO: 74 - DNA, 1083 bp, Arabidopsis thaliana
  CDS (1)..(1083): ORF AT4g01220, Linie 159012
atggcgcagcaaaagttccttcaccagcgaccaatccaaaacccattcacaaacccattctcttcttctcctctttccacttcttcaatctcaaatcgtccaatctctctactcagccgcaacggtctcctcctccttctcgctctcctcgttatcctcggcgtattcttaccctgggcaggatctcctttattcccgtctccaaacaaactctctccttctcaatccaaatggcgcgactattccctccctcaagctgtcaaattcgtagctaagaacgggactgtgatcgtatgcgccgttagctatccttacttgccgtttctcaacaattggttgattagtgtttctagacagaagcatcaggatcaagttctcgtcatcgctgaggattacgctactctctacaaagttaacgagaaatggcctggtcacgccgttctcattcctccggcgctcgattctcagaccgctcacaaattcggttctcagggattcttcaatttcacagcacggaggccgcaacatctcttggaaattttggagttaggttacaatgttatgtacaacgatgttgatatggtttggttgcaagatccgtttcagtatttagagggaaagcacgatgcttacttcatggatgatatgactgcaattaagcctttggatcactctcatgatttaccacctccgggtaaaaaaggaaggacttatatttgtagctgtatgattttcttgcgtcccactaatggcgcaaaacttctcatgaagaaatggatcgaggagcttgaaacgcaaccttggtccagagctaagaaagcaaatgatcagcctggttttaactgggcacttaacaaaacagctaatcaggtggatatgtacttgctttcgcaggcagctttcccaacaggaggattgtatttcaagaacaaaacatgggttaaagaaacaaagggaaaacatgcgataatccacaataactacatagtcggttttgagaagaagatcaaacgtttccgtgactttaatctatggctagtcgatgatcatgcttccgagtctcctttagggaaattagagtaa

SEQ ID NO: 75 - protein, 360 aa, Arabidopsis thaliana
MAQQKFLHQRPIQNPFTNPFSSSPLSTSSISNRPISLLSRNGLLLLLALLVILGVFLPWAGSPLFPSPNKLSPSQSKWRDYSLPQAVKFVAKNGTVIVCAVSYPYLPFLNNWLISVSRQKHQDQVLVIAEDYATLYKVNEKWPGHAVLIPPALDSQTAHKFGSQGFFNFTARRPQHLLEILELGYNVMYNDVDMVWLQDPFQYLEGKHDAYFMDDMTAIKPLDHSHDLPPPGKKGRTYICSCMIFLRPTNGAKLLMKKWIEELETQPWSRAKKANDQPGFNWALNKTANQVDMYLLSQAAFPTGGLYFKNKTWVKETKGKHAIIHNNYIVGFEKKIKRFRDFNLWLVDDHASESPLGKLE

SEQ ID NO: 76 - DNA, 1311 bp, Arabidopsis thaliana
  CDS (1)..(1311): ORF F13011.11, Linie 106037
atgcttctggtttctcctgcttgtagaggtgtttatcttcagaccatagatccaaagccaattgatttctcagctagagcctcttatgcactttgctttcagattcctacttcaatccctaaaagagagtgtttgatgaggttaggaacggtcttttgttttaatcagaagcatagagagcagacaagttttaagaaacggtatgtatctacgcagaatgtggatcttcctcctattttaccaaagaacaagaagaaaccttatcctattccttttaagcaaatccaagaagaggctaggaaagataagaaacttgctcagatgggtatagagaaacagttggatcctcctaaaaatggattgctagttcccaatcttgttcctgtggctgatcaagtgatagataactggaagttgttgatcaagggtttagcacagcttcttcatgttgttcccgtctttgcttgtagtgaatgtggagcggttcatgtggctaatgttggtcataacattagggattgtaatggtccaacgaattcacagcgacgtggttctcattcttgggttaagggtaccattaacgatgttcttattcctgttgagtcgtaccacatgtatgaccctttcgggcggcggattaagcatgaaacacggtttgagtatgaaagaatcccagcacttgttgagctatgtattcaagctggagttgagatccctgagtatccttgtcgcagaaggacacagccaatcagaatgatggggaagagagtgatcgatcgaggtggatatcataaagagcctgaaaagcctcagacatcatcatcattatcatctccattagccgagcttgatactcttggtgtttttgaaaggtatccacctcccactccagaggatatacctaagatagcacaggaaacaatggatgcttatgagaaagtgagattgggggtgacgaaattaatgaggaaattcacagtgaaagcatgcggatattgttctgaagtgcatgtaggaccatggggacatagtgtaaagctgtgcggagagttcaagcaccaatggagagatgggaagcacggatggcaagatgctcttgtggacgaagtctttcctccaaactatgtatggcatgtgagagaccttaagggaaatccgcttaccggaaacctcagaaggttttatggtaaagcccctgctttggttgagatttgtatgcacagtggagctcgggttcctcaacgctataaggccatgatgaggcttgacatcattgttcctgattcacaggaagccgacatggtcgcataa

SEQ ID NO: 77 - protein, 436 aa, Arabidopsis thaliana
MLLVSPACRGVYLQTIDPKPIDFSARASYALCFQIPTSIPKRECLMRLGTVFCFNQKHREQTSFKKRYVSTQNVDLPPILPKNKKKPYPIPFKQIQEEARKDKKLAQMGIEKQLDPPKNGLLVPNLVPVADQVIDNWKLLIKGLAQLLHVVPVFACSECGAVHVANVGHNIRDCNGPTNSQRRGSHSWVKGTINDVLIPVESYHMYDPFGRRIKHETRFEYERIPALVELCIQAGVEIPEYPCRRRTQPIRMMGKRVIDRGGYHKEPEKPQTSSSLSSPLAELDTLGVFERYPPPTPEDIPKIAQETMDAYEKVRLGVTKLMRKFTVKACGYCSEVHVGPWGHSVKLCGEFKHQWRDGKHGWQDALVDEVFPPNYVWHVRDLKGNPLTGNLRRFYGKAPALVEICMHSGARVPQRYKAMMRLDIIVPDSQEADMVA

SEQ ID NO: 78 - DNA, 1023 bp, Arabidopsis thaliana
  CDS (1)..(1023): ORF F25L23_240, Linie 126905
atggagtcttcggttttcgactttggatcggagtcggggaacatgaatttcgacgagaccgtgccactgagccaacgattggagtggtcagacgtggtcccattgactcaggacgatggtccgaatccagtggtgccaattgcctacaaggaagagttccgcgagactatggattacttccgtgcgatttacttttccgacgagcgatctcctcgcgcactacgactcacggaagaaaccctcctcttaaactccggcaactacacagtgtggcatttcaggcgcctagtactcgaggcccttaatcacgacttgtttgaagaactcgagttcatcgaacgcattgctgaggataactctaagaactaccaactgtggcatcatcggcgatgggttgcagagaaactgggtcctgatgttgcagggagagaacttgaatttacccgtagagtactttcacttgatgccaaacattatcatgcttggtcacataggcagtggacactacgggcattaggaggatgggaagatgagctcgattactgtcacgagctccttgaagctgacgtctttaacaattccgcctggaatcagaggtattatgtcatcacccaatctcctttgttgggaggcctagaagccatgagagaatctgaagtaagctacacaatcaaagccattttaaccaatcctgcaaacgagagctcatggcgatacctaaaagctctttacaaagacgacaaagaatcctggattagtgatccaagtgtttcctcagtctgtttgaatgttctatcccgcacagattgcttccatggattcgctctgagcacccttttggatcttctatgtgatggactgagaccaaccaacgagcataaagactcagtgagagctctagctaatgaagaaccagagactaacttggccaatttggtgtgtactattcttggtcgtgtagatcctgtaagagctaactattgggcatggaggaagagcaagattacagtggcagcaatttga

SEQ ID NO: 79 - protein, 340 aa, Arabidopsis thaliana
MESSVFDFGSESGNMNFDETVPLSQRLEWSDVVPLTQDDGPNPVVPIAYKEEFRETMDYFRAIYFSDERSPRALRLTEETLLLNSGNYTVWHFRRLVLEALNHDLFEELEFIERIAEDNSKNYQLWHHRRWVAEKLGPDVAGRELEFTRRVLSLDAKHYHAWSHRQWTLRALGGWEDELDYCHELLEADVFNNSAWNQRYYVITQSPLLGGLEAMRESEVSYTIKAILTNPANESSWRYLKALYKDDKESWISDPSVSSVCLNVLSRTDCFHGFALSTLLDLLCDGLRPTNEHKDSVRALANEEPETNLANLVCTILGRVDPVRANYWAWRKSKITVAAI

SEQ ID NO: 80 - DNA, 3006 bp, Arabidopsis thaliana
  CDS (1)..(3006): ORF T19K24.18, Linie 127458
atggcgccgagtagacgggatttacagcttactccggtcaccggaggttcttcttcccagatcagtgatatggaagaagttggtcttctcgattcgtatcacaacgaagcgaacgccgatgatattttgactaaaatcgaagaaggaagagatgtttccggtttaaggaagattcaggtcggagtcaccggtatgacttgtgctgcttgttctaattccgttgaagcagctttgatgaacgttaatggcgtcttcaaagcctctgttgctttgttacagaatcgagccgatgtcgtcttcgaccctaatttagtcaaggaagaggatattaaagaagctatagaggatgctggatttgaggctgagatattggctgaagaacagacacaagctactttggtgggtcaatttacaattggaggtatgacttgtgcagcttgtgttaactctgttgaaggtattctaagagatcttcctggagtgaaaagagcagtggtagctttgtctacatcattaggagaagttgagtatgatccaaatgttattaacaaggatgatattgttaatgcgattgaagatgctgggtttgaaggttcgcttgtgcagagtaatcagcaggataagcttgttttaagggtggatgggattttgaatgagcttgatgctcaggttttagaagggatacttactagattgaatggggttagacagtttcgtcttgacaggatatctggagagcttgaggttgtgtttgatccggaagttgttagttcgagatctttggttgatgggattgaagaagatggatttgggaagtttaagttgcgtgttatgagcccttatgaaaggttgtcttcgaaagatactggagaggcctcaaatatgtttcggcgttttatctccagtcttgttcttagtattcctctcttcttcatccaagtaatctgcccccacattgctctttttgatgccttactggtatggagatgtggacccttcatgatgggtgattggttgaaatgggccttggtaagtgttattcagtttgttatcggcaagcgattctatgttgcagcatggagagctctacgaaatggttcaactaacatggatgtgctcgtcgctctgggcacgtctgcttcttacttctactctgttggggctcttttatatggagcagtcactggattttggtctccaacatactttgatgcaagcgccatgctgataacttttgtcttactgggaaaatatttagagtctcttgcaaaggggaaaacctcggatgctatgaagaaactagtacaacttacgccagcaacagcgattttactaactgaaggcaaaggaggaaagcttgtaggggaaagggagatagatgcattattgattcagcctggtgatacattaaaagttcatcccggtgcaaagatccctgcagatggtgttgtggtgtggggttcaagttacgttaatgaaagtatggtgactggtgaatcagttcctgtatcaaaagaggttgattcaccagtaatcgggggtactattaatatgcatggtgctcttcacatgaaagctacaaaggtgggatctgatgcagttctgagccagattattagtttggtcgagaccgcccaaatgtcaaaagctcctattcagaaatttgcggattatgttgcaagtatttttgttccggtagtgattactttggcattgttcaccttagtaggctggtcaattggtggagctgttggagcttacccagacgaatggcttccggagaacgggactcactttgttttctcgcttatgttctcaatatccgttgtggtaattgcttgtccttgtgcacttggcttggcaacaccgactgctgttatggtggcaacaggagttggagcaaccaatggtgtattgatcaaaggaggtgatgcattagagaaagctcacaaagtgaagtatgtaatctttgacaaaacaggcaccttaactcaaggaaaagctactgtgacaaccacaaaggtcttctcagagatggaccgtggagaattccttacacttgttgcgtctgctgaggctagcagtgaacacccattggcaaaagctatagttgcgtacgctcggcatttccacttctttgatgaatccactgaagatggcgaaacaaataacaaagatttgcaaaactctggatggttacttgatacctcggatttctctgctcttcccggaaaagggattcagtgcttagtcaatgagaagatgattctggtgggaaaccgtaaacttatgtcagaaaatgccataaacatcccagaccatgtcgagaaatttgtggaagatcttgaagaaagcggaaagacgggagtcattgtagcctataatgggaaattagttggtgtgatgggaatcgcggatcctctaaagcgagaagccgctttggttgtggaaggtctccttagaatgggtgttcgacccataatggttacaggtgataactggagaacagcaagagcagtcgccaaagaggttggtatcgaagatgtgagagcagaagtaatgccagctggtaaagctgacgttatacgttcgctgcaaaaggacggaagcacagtagccatggtaggagacggaatcaatgactctcccgctctagccgctgcagatgtgggaatggcaattggtgcaggaacagatgtagcaatagaagcagcagattacgttctgatgagaaacaacttagaagacgttataacagccatcgatctctctcgaaaaaccttaacacgaatccgattaaattacgtcttcgcaatggcgtacaatgtagtgtcaatcccgatagcagcaggagtgtttttcccggttctgcgggtgcaattaccgccttgggcagccggagcatgtatggcactctcttcggttagtgttgtttgctcttctttgcttcttagaagatacaagaagccaagacttaccactgttttgaaaatcaccacggagtaa

SEQ ID NO: 81 - protein, 1001 aa, Arabidopsis thaliana
MAPSRRDLQLTPVTGGSSSQISDMEEVGLLDSYHNEANADDILTKIEEGRDVSGLRKIQVGVTGMTCAACSNSVEAALMNVNGVFKASVALLQNRADVVFDPNLVKEEDIKEAIEDAGFEAEILAEEQTQATLVGQFTIGGMTCAACVNSVEGILRDLPGVKRAVVALSTSLGEVEYDPNVINKDDIVNAIEDAGFEGSLVQSNQQDKLVLRVDGILNELDAQVLEGILTRLNGVRQFRLDRISGELEVVFDPEVVSSRSLVDGIEEDGFGKFKLRVMSPYERLSSKDTGEASNMFRRFISSLVLSIPLFFIQVICPHIALFDALLVWRCGPFMMGDWLKWALVSVIQFVIGKRFYVAAWRALRNGSTNMDVLVALGTSASYFYSVGALLYGAVTGFWSPTYFDASAMLITFVLLGKYLESLAKGKTSDAMKKLVQLTPATAILLTEGKGGKLVGEREIDALLIQPGDTLKVHPGAKIPADGVVVWGSSYVNESMVTGESVPVSKEVDSPVIGGTINMHGALHMKATKVGSDAVLSQIISLVETAQMSKAPIQKFADYVASIFVPVVITLALFTLVGWSIGGAVGAYPDEWLPENGTHFVFSLMFSISVVVIACPCALGLATPTAVMVATGVGATNGVLIKGGDALEKAHKVKYVIFDKTGTLTQGKATVTTTKVFSEMDRGEFLTLVASAEASSEHPLAKAIVAYARHFHFFDESTEDGETNNKDLQNSGWLLDTSDFSALPGKGIQCLVNEKMILVGNRKLMSENAINIPDHVEKFVEDLEESGKTGVIVAYNGKLVGVMGIADPLKREAALVVEGLLRMGVRPIMVTGDNWRTARAVAKEVGIEDVRAEVMPAGKADVIRSLQKDGSTVAMVGDGINDSPALAAADVGMAIGAGTDVAIEAADYVLMRNNLEDVITAIDLSRKTLTRIRLNYVFAMAYNVVSIPIAAGVFFPVLRVQLPPWAAGACMALSSVSVVCSSLLLRRYKKPRLTTVLKITTE

SEQ ID NO: 82 - DNA, 477 bp, Arabidopsis thaliana
  CDS (1)..(477): ORF F19B15.50, Linie 304249b
atggcagttaggtgtttagccgtgttcctcgttgctctcatggtgtctcaagcagtcaccgcaacaagaccggctccaaccaagaatgtcggagctggtcttgacgaccaaaagaactttgtagcgttcgctggtgtcggtggagctgctggaattggtggagccggtggtgttggagctggtcttggtggtgtcgccggtggagttggtggtgttgccggagttttgcctgttggcggtgtaggcggcggaattggtggtctaggcggtggtgtaggtggtcttggcggtctaggtggtctaggtggtggttcaggtcttggtcatggagtaggtggaattggtggtgaccctggtattggtagtggtatcggtggactcggcggtgcaggtggtctaggcggtataggcggtgttggtggtttgggtggaattggcggtggaagcgattgcggtggcgtaattcctcaccattga

SEQ ID NO: 83 - protein, 158 aa, Arabidopsis thaliana
MAVRCLAVFLVALMVSQAVTATRPAPTKNVGAGLDDQKNFVAFAGVGGAAGIGGAGGVGAGLGGVAGGVGGVAGVLPVGGVGGGIGGLGGGVGGLGGLGGLGGGSGLGHGVGGIGGDPGIGSGIGGLGGAGGLGGIGGVGGLGGIGGGSDCGGVIPHH

SEQ ID NO: 84 - DNA, 1272 bp, Arabidopsis thaliana
  CDS (1)..(1272): ORF K21H1.18, Linie 304264b
atgaaactaaatctctcgaatctcagatttctacgtacccgaaaatcgttaatctcccagacgcgagcaatgactcaaaatccggatccaaaacctgatccatcgcaggttctagacgatatcctctgttcggagcagcgtgatgggcagattgaggaaacagtcgacacagcgccggcgagcttgggctctccaagtcgggtcttaagcattgatactagagtagagagagcttgggcacactggaaaaaactgggtagacccaagtatatcgttgctccaatggttgataactctgagcttccgtttagattgctctgccagaaatacggagctcaggctgcttatactccgatgttgcattctaggatcttcaccgagactgagaagtatagaaatcaggagttcaccacctgtaaggaggacaggccattgtttgtgcagttctgtgctaatgatcctgatacgttattggaagctgcaaagagagtcgaaccttactgcgactatgttgatatcaatttagggtgtcctcagcgtatagcgaggcgaggaaattatggtgcattcttgatggataatcttcctttggtgaaatcacttgttgaaaagttagctcagaacctcaatgttcctgtctcctgtaaaatccggatcttcccgaacctggaagatacactcaagtacgccaagatgctagaagatgctggttgctcgctcctagctgttcacgggcgaacaagagatgagaaagacgggaagaaatttagagctgattggagcgcaatcaaggaagtgaaaaacgctatgagaatccctgtcttagcgaatgggaatgtaagatgcatcgaagatgtcgataactgcatcaaagagacgggtgttgaaggtgttctctctgcggagacgcttcttgaaaacccggcggcctttgctgggtttagaacagctgaatgggcaaaagataacgaagaagagggattcgtcgatggagggttagaccagggagatttagttgttgagtatttaaagctgtgtgagaagcatccggttccatggaggatgattcgatctcacgttcataagatgttgggagaatggtttagaattcatccacaagttagagagcaacttaatgctcaaaacatattgacgtttgagtttctatacggacttgtggatcagctaagagagcttggaggaagagttccactctacaagaaaaagaagatagatactctgactccacaagactctccacaaagggtttag

SEQ ID NO: 85 - protein, 423 aa, Arabidopsis thaliana
MKLNLSNLRFLRTRKSLISQTRAMTQNPDPKPDPSQVLDDILCSEQRDGQIEETVDTAPASLGSPSRVLSIDTRVERAWAHWKKLGRPKYIVAPMVDNSELPFRLLCQKYGAQAAYTPMLHSRIFTETEKYRNQEFTTCKEDRPLFVQFCANDPDTLLEAAKRVEPYCDYVDINLGCPQRIARRGNYGAFLMDNLPLVKSLVEKLAQNLNVPVSCKIRIFPNLEDTLKYAKMLEDAGCSLLAVHGRTRDEKDGKKFRADWSAIKEVKNAMRIPVLANGNVRCIEDVDNCIKETGVEGVLSAETLLENPAAFAGFRTAEWAKDNEEEGFVDGGLDQGDLVVEYLKLCEKHPVPWRMIRSHVHKMLGEWFRIHPQVREQLNAQNILTFEFLYGLVDQLRELGGRVPLYKKKKIDTLTPQDSPQRV

SEQ ID NO: 86 - DNA, 699 bp, Arabidopsis thaliana
  CDS (1)..(699): ORF F309.4, Linie 192813
atggcgtcttcatcggattcatggatgagagcatacaacgaggctttaaaactctctgaggagattaatggaatgatatcagaaagaagttcatcggctgtcacagggcctgatgctcagcgtcgtgcttcagctatacgaaggaagatcaccattttcggtaacaaattagatagtctgcagtctcttcttgctgaaattcatggaaaacctatttcagagaaagagatgaatcggcgaaaggatatggtagggaatctgaggtcaaaagcaaaccagatggcgaatgctttgaacatgtcaaactttgccaatagagacagcttgctcgggccagatatcaagccggatgattccatgagcagagttactggcatggataaccaaggaattgttggatatcaacgacaagttatgagagaacaagacgaaggacttgagcaattggagggaacagtcatgagcacaaaacacattgctctggctgttagtgaagagcttgacttgcagactaggcttattgatgacttagattaccatgtggatgttactgactctcgcttaaggagagtgcagaagagccttgctgtcatgaacaagaatatgagaagtggttgctcttgcatgtcaatgctcttgtcagtgctggggatcgtcggtcttgctgttgtaatatggatgttggttaagtatatgtaa

SEQ ID NO: 87 - protein, 232 aa, Arabidopsis thaliana
MASSSDSWMRAYNEALKLSEEINGMISERSSSAVTGPDAQRRASAIRRKITIFGNKLDSLQSLLAEIHGKPISEKEMNRRKDMVGNLRSKANQMANALNMSNFANRDSLLGPDIKPDDSMSRVTGMDNQGIVGYQRQVMREQDEGLEQLEGTVMSTKHIALAVSEELDLQTRLIDDLDYHVDVTDSRLRRVQKSLAVMNKNMRSGCSCMSMLLSVLGIVGLAVVIWMLVKYM

SEQ ID NO: 88 - DNA, 3435 bp, Arabidopsis thaliana
  CDS (1)..(3435): ORF, AT2g31830, Linie 203521
atggattcggtaattattgaaccagatgagcgggaggcgttggcatcgcttgtccctgctcatcctcttcctccccgtaagacacattcctatgtcgagcaatgcgaacagaagccgcaccatccaatccgcaaatatagccttgatgagggctctagatccgtgacatcggattctgaagctgtttattttgattcctctgatggtgagttctctaccgaaggagtagccatcgtcgatggaagaaccagtggtgaaagaggcaacggggaggaatgtggttttgtcacgcctccatcgaaaccagcatcacagggcggtggaaatgacggcggcagggaggatgatatcgagtcccttccagaattcattggcgcaggaggtggccttgacgtattcaaggtgccggtgcgtgccgcggtgaatcccggacggcctccatgtctcgagctccgaccgcatccattaagagagacacagacgggaaagtttctgagaaacattgcttgcacagaaagtcagctatgggcgggacaagagaacggcgtgaggttctggaacttggaggaagcatacgaggtcggttgtggccttggcgggcaggtacggcgaggggatgaggatacagccccgtttcatgaatctgttccgacctcgcctgccttatgtttattggttgaccacggcaataggcttgtgtggaccggccacaaggatggcaaaattagggcctggaaaatgaatcagcccaatacgactactgcagatgattcaaagcctttcaaggaacgactctcatggcaagctcatcgtggtcctgtgaattatattgtcataagctcatatggtgatatgtggtcatgttctgatggcggtgtgataaagatatggactttggattctttagagaagtctcttgtgctaaaactggaggagaagcatatggccgcattgttagttgagaggtctggcattgacctgaggagccaagttactgtcaatggtacatgcagcatttcttcgtcagatgtcaagtttttgttagttgatacagtaaaagctaaagtttgggctgtgcaacacctctcattctcactttgggatgctcaaaataaagagcttctgaaagtttttaatattgatggccaagtcgaaaatcgagtggacatgccaccaacacaaggtcaacaagttgaagacacgaaagcgaagttcttctccgcaccaaaaaaggaaaaatcacagggctttctgcaaagatcgcgccatgccattatgggagctgcaggagctgttcgtcgagctgccactagaagtgcaggagcttttgcagaagacactaggaaagtagaagctattgcgatagcggcagatggatcaatttggactggaagcatgaatggtgtaattgctcagtgggacggaaatggaagccgcttgcgggaggtgaatcatcatcagcaggctgttctgtgcttttgcacttttggtgatcgaatatatgtgggttattcaagtggttacattcaggtcttggatcttggtggaaagctaattgcaagctgggtttcacacaatgaacctgtgataaagctagcagcaggtggtggtttcatttttagcttagccactcatggtggtgtaagaggatggtatgtgacatccccaggacctcttgacagcttaatccgaacagaattgtctcaaaaggaaatggcatatgcccgacaagacagtgttaaaatcttgattggtacctggaatgttggtgaaggacgggcttcacgcggagcgcttgtgtcttggctgggttctgctgtttcagatgttggcattgtcgctattggcttgcaagaggtggatatgggggctggtttcctagccatgtccactgctaaggaaacggtaggggttgaaggaagtgccgtggggcaatggtggcttgatgcaattggaaatgcactggatgagagaaatactttcgaacgtatgggttcaaggcagttggctggactgctaatatctctttgggtgaggaagagtattaggacacatgtcggagatcttgatgtcgcagcagttccatgtggatttggccgcgccatagggaacaagggaggtgtgggtttgagaatcagagtttatgaccggattatgtgctttgtgaactgtcacttggctgctcacttggaggcagttactcggagaaacgcggattttaatcacatatatcggtcaatggtcttctccaaaggacaaagtgtatatactgctgcagctgctggtgcttcaacatctgctcaagcgctaaagaataaccctaatacaaacaacagcactgaagaggagaagtctcatttagcatcagcagatctggttgcatttttcggtgacttcaattacaggttgtttggtattacctatgatgaagcgagggacttcatctcgcaccgatcttttgattggctcagagagaaagaccaacttaggcaagagatgaatgagggaaaagtgttccaaggaatgcgtgaggcattaatcaccttcccgccgacctacaaatttgaaaagaataaaccaggtcttggagggtatgattcaggggagaaaaagcgaatacccgcttggtgtgacagagttatatatagagacaaccaatcaatctcatatacggagtgcagtttaaagtgccctgtagtttcgtcgactataatgtatgaagcttgcatggatgtgactgagagcgatcacaaacccgtgcggtgcaaacttcatgctaacatagctcacaccgataaatctgtgcgaagacaggagctagggaaaatagtcaagtcgaatgagaaactcagagccatgttcgaggaactaaaatcagttccagaaacatcagtgagcaccaacaacattcttctccatagtcaggacacgttcatctttacaatcagaaacacttcaaactcgagtagagccatcttcaacatcgtctgtaagggtcaaactctcgttagagaggatggagaggaacctgataatcattcaagaggcacatttggtctccctcgctggcttgaggtttctccaggagctgggattataaaaccagatgcttcactgcaggtgaaggttcatcatgaagactcccacaactcggaggagttcattgatggcatccaacaaaactcattgtctgaagaaagttctgacaaagaagtgaccctgatcataatcgttcagggaagctgctcgaccagaacaataagccactctatcaaagtccggcactgctcctccgcagccaaatcccttagtcttgttcattctaaaacaaccaccatgactaagaatctagagggttccactcgttaccagacagatgctaaccgcggtggaagcaccagacacagaaccgatgactccaccagacgtggttga

SEQ ID NO: 89 - protein, 1144 aa, Arabidopsis thaliana
MDSVIIEPDEREALASLVPAHPLPPRKTHSYVEQCEQKPHHPIRKYSLDEGSRSVTSDSEAVYFDSSDGEFSTEGVAIVDGRTSGERGNGEECGFVTPPSKPASQGGGNDGGREDDIESLPEFIGAGGGLDVFKVPVRAAVNPGRPPCLELRPHPLRETQTGKFLRNIACTESQLWAGQENGVRFWNLEEAYEVGCGLGGQVRRGDEDTAPFHESVPTSPALCLLVDHGNRLVWTGHKDGKIRAWKMNQPNTTTADDSKPFKERLSWQAHRGPVNYIVISSYGDMWSCSDGGVIKIWTLDSLEKSLVLKLEEKHMAALLVERSGIDLRSQVTVNGTCSISSSDVKFLLVDTVKAKVWAVQHLSFSLWDAQNKELLKVFNIDGQVENRVDMPPTQGQQVEDTKAKFFSAPKKEKSQGFLQRSRHAIMGAAGAVRRAATRSAGAFAEDTRKVEAIAIAADGSIWTGSMNGVIAQWDGNGSRLREVNHHQQAVLCFCTFGDRIYVGYSSGYIQVLDLGGKLIASWVSHNEPVIKLAAGGGFIFSLATHGGVRGWYVTSPGPLDSLIRTELSQKEMAYARQDSVKILIGTWNVGEGRASRGALVSWLGSAVSDVGIVAIGLQEVDMGAGFLAMSTAKETVGVEGSAVGQWWLDAIGNALDERNTFERMGSRQLAGLLISLWVRKSIRTHVGDLDVAAVPCGFGRAIGNKGGVGLRIRVYDRIMCFVNCHLAAHLEAVTRRNADFNHIYRSMVFSKGQSVYTAAAAGASTSAQALKNNPNTNNSTEEEKSHLASADLVAFFGDFNYRLFGITYDEARDFISHRSFDWLREKDQLRQEMNEGKVFQGMREALITFPPTYKFEKNKPGLGGYDSGEKKRIPAWCDRVIYRDNQSISYTECSLKCPVVSSTIMYEACMDVTESDHKPVRCKLHANIAHTDKSVRRQELGKIVKSNEKLRAMFEELKSVPETSVSTNNILLHSQDTFIFTIRNTSNSSRAIFNIVCKGQTLVREDGEEPDNHSRGTFGLPRWLEVSPGAGIIKPDASLQVKVHHEDSHNSEEFIDGIQQNSLSEESSDKEVTLIIIVQGSCSTRTISHSIKVRHCSSAAKSLSLVHSKTTTMTKNLEGSTRYQTDANRGGSTRHRTDDSTRRG

SEQ ID NO: 90 - DNA, 2304 bp, Arabidopsis thaliana
  CDS (1)..(2304): ORF F24D7.13, Linie 206462
atggcgttcacctttctctctcctcacccagtctttctctctctaactggaacaacctcttccttctcctacaaaccagttctcttaccattctctcgaaattcccgtactctcacggttgcggcgggacctgctcgccggaattcgtacccgaaccctgctgatgacgatccacctgaagcaccggaggattcaatgcacggagtttcgaagtttcagcagatccagcgtcaagctgctcgtgcacggaagctagaggaagaagatttcgagaagaatcggaacacttatctctccgctatcgccgatgtggaagacgcggcggagacgggacgagatgacgaagaatctggtggagacttgttctctgatatcgatagagcaatctccatgaaacgtagtgagtttgttaagcaaggattgctcaaacctaatcctcccaaaacggcatcgcttaagaagattggggaggagggaaatgaggaagaaggtgatgttactgacgatgttgatgagcttgatgaagaagaagttgttgatttggatgaaattgataaattaactggattaacagagatttctgatgaagaagattgggttgatgaggaaggtaacactaggatcaacaagaagaaggagtttgggtctgatcatcaatttgaattcgatttggatgattttggtgaatctaaagcgagaatcgtggaacctaagttcaaaatgtgcttagctgagcttttagatgagagtaaagtggtaccaatctcagtttacggcgatttagatgtcgaaatcaccgggattcaacatgattcgcgcggtgtgagcgccggagatctcttcgtgtgttgtttaggaagtgaaaatttcttgagtgaagcagataagagaggagcagtggcggttgtagctagcaaagagattgatattgaagatactttaggttgcagagcacttgtcattgttgaagatacgaatgcagttttagcagctttagcttcttccttttataggcatccctcgaagaacatgtcggtgattggagttactggtacggatgggaaaacgactactacgtatttgattaagagcctctatgaagcgatgggtgtgagaacaggaatgtttagcacagtttcttgttatattcatggcgataacaaattggatacgcctaatgctacgatgaatcctgatgctgttttggttcagagtttgatggctaagatgttgcataatggaactgaatctttggttatggaagcttctcctcaagaacttgctttagggaaatgtgatgaagtggatttcgacattgcggttttcacaaatttgactagagaaaatacggattttcgtggtactgatgaagagtatagagatgctgaagccaagttgttttcaagaatggttgatccggaaaggcataggaaagtggttaacatagatgatccaaacgcagcattctttgtccagcaagggaatcctaatgttcctgttgtgacatttgccatggaaaacaccaaagccgatgttcacccgttaaagtttgagctttccttgtttgagacacaggttttggttaatacccctcaaggtatactggagatctcttcgggtttgttaggacggcataacatttataatattcttgctgctgtggctgttgggattgctgttggagctcctcttgaggatattgttagaggtgttgaggaagtcgatgcagtcccaggaaggtgtgagttgattgatgaggaacaagcttttggtgttattgtggatcatgcaaacacacctgatggcttgtcaaggctgctagattcaattcgagagcttaaaccgagaagaatcattaccgttattggttgtgagggtgagaatgaaagagggaaaagaccgcttatgacgaaaattgctactgaaaagagcgatgtgacgatgttgacatctgataatccgaggaatgaagatccattggacatcttggatgacatgttgtctgggattggatggacgatgcaagagtatttgaaacatggcgaacacgattactatccgcctttggcaaatggtcatagactcttccttcacgatattagacgtgtagctgtacgttgtgctgttgctatgggtgaagaaggtgatatggttgttgtagctgggaaagggcatgaagcgtatcagcttgaaggtgaaaagaaagagttttatgatgacagagaggaatgtcgggaagcattacaatacgttgatgagcttcaccaagctggaatagacacaagcgagttcccatggcggtaa

SEQ ID NO: 91 - protein, 767 aa, Arabidopsis thaliana
MAFTFLSPHPVFLSLTGTTSSFSYKPVLLPFSRNSRTLTVAAGPARRNSYPNPADDDPPEAPEDSMHGVSKFQQIQRQAARARKLEEEDFEKNRNTYLSAIADVEDAAETGRDDEESGGDLFSDIDRAISMKRSEFVKQGLLKPNPPKTASLKKIGEEGNEEEGDVTDDVDELDEEEVVDLDEIDKLTGLTEISDEEDWVDEEGNTRINKKKEFGSDHQFEFDLDDFGESKARIVEPKFKMCLAELLDESKVVPISVYGDLDVEITGIQHDSRGVSAGDLFVCCLGSENFLSEADKRGAVAVVASKEIDIEDTLGCRALVIVEDTNAVLAALASSFYRHPSKNMSVIGVTGTDGKTTTTYLIKSLYEAMGVRTGMFSTVSCYIHGDNKLDTPNATMNPDAVLVQSLMAKMLHNGTESLVMEASPQELALGKCDEVDFDIAVFTNLTRENTDFRGTDEEYRDAEAKLFSRMVDPERHRKVVNIDDPNAAFFVQQGNPNVPVVTFAMENTKADVHPLKFELSLFETQVLVNTPQGILEISSGLLGRHNIYNILAAVAVGIAVGAPLEDIVRGVEEVDAVPGRCELIDEEQAFGVIVDHANTPDGLSRLLDSIRELKPRRIITVIGCEGENERGKRPLMTKIATEKSDVTMLTSDNPRNEDPLDILDDMLSGIGWTMQEYLKHGEHDYYPPLANGHRLFLHDIRRVAVRCAVAMGEEGDMVVVAGKGHEAYQLEGEKKEFYDDREECREALQYVDELHQAGIDTSEFPWR

SEQ ID NO: 92 - DNA, 1488 bp, Arabidopsis thaliana
  CDS (1)..(1488): ORF MRC8.5, Linie 216642
atgtttctttttctcctcctcctctctgcttcccgctccggcgaagagtcgccgtccggagacgccgtcccattggccaccggcggtcttaacagaaagagttttccggaaggattcttgttcggaaccgccacgtcagcttaccaggtcgaaggcgagacccaccaagatggtcgtggtccaagcatttgggatgcattcgtcaagattcctggtaagattgccaacaatgccactgctgagataacagtggaccaatatcatcgttacaaggaagatgtagatttgatgcagaacctgaacattgatgcctacagattttccatttcatggtctagaatattccctgagggatccggtaaaatcaactcgaatggagttgcttattacaatagattgatcgattacttgatcgaaaaagggattacaccgtatgctaatctgtaccactatgaccttcctttagccttggaacaaaagtatcaaggcctgcttagtaaacaagtagtagttttgtttcaaacatttggagatagagtgaagaactggatgacgtttaacgagcctcgtgtagtagctgctctaggttatgataacggcatttttgcgccgggtagatgctctgaagcatttggaaactgcactgatggaaactctgcaactgaaccatacattgttgcacatcaccttatcttggcacatgcagcagccgtccagagataccgccaaaattatcaggagaaacaaaagggaagggttgggattctactggattttgtttggtttgagccacttacgagtagtcaagcagacaatgacgctgctcaaagagcaagagacttccatgttggatggtttattcacccaatagtgtatggagagtacccaaatacgttgcaaaacatcgtgaaggagagacttccgaagttcaccgaggaagaagtgaaaatggtgaaaggttccatagacttcgtggggataaaccaatacacaacttatttcatgtctgatcctaaaatatctaccacacctaaagatttgggttatcaacaagattggaacgtcacttttaactttgcaaagaatgggacaccaattggtccaagggcacattcagaatggttatacaatgtcccatggggaatgtacaaagctttaatgtacattgaggaacgttatggcaacccaactatgattctctccgaaaacggtatggatgatccgggcaacataactctaactcaaggactaaatgatacaacaagagtcaagtattatagagactatttagtgcagcttaaaaaagcagtagacgatggagccaatctaactggatattttgcgtggtcgttgctagataatttcgaatggttatcaggatatacttcaaggtttggaatagtgtacgttgattacaaggacttgaagagataccccaagatgtctgctttatggtttaaacaacttttgaaacgggaccagaaatga

SEQ ID NO: 93 - protein, 495 aa, Arabidopsis thaliana
MFLFLLLLSASRSGEESPSGDAVPLATGGLNRKSFPEGFLFGTATSAYQVEGETHQDGRGPSIWDAFVKIPGKIANNATAEITVDQYHRYKEDVDLMQNLNIDAYRFSISWSRIFPEGSGKINSNGVAYYNRLIDYLIEKGITPYANLYHYDLPLALEQKYQGLLSKQVVVLFQTFGDRVKNWMTFNEPRVVAALGYDNGIFAPGRCSEAFGNCTDGNSATEPYIVAHHLILAHAAAVQRYRQNYQEKQKGRVGILLDFVWFEPLTSSQADNDAAQRARDFHVGWFIHPIVYGEYPNTLQNIVKERLPKFTEEEVKMVKGSIDFVGINQYTTYFMSDPKISTTPKDLGYQQDWNVTFNFAKNGTPIGPRAHSEWLYNVPWGMYKALMYIEERYGNPTMILSENGMDDPGNITLTQGLNDTTRVKYYRDYLVQLKKAVDDGANLTGYFAWSLLDNFEWLSGYTSRFGIVYVDYKDLKRYPKMSALWFKQLLKRDQK

SEQ ID NO: 94 - DNA, 1779 bp, Arabidopsis thaliana
  CDS (1)..(1779): ORF F15M4.1, Linie 219902
atggatctccgtcggaggcctcctaaaccaccggttaccaacaacaacaactccaacggatctttccgttcttatcagcctcgcacttccgatgacgatcatcgtcgccgggctacaacaattgctcctccaccgaaagcatccgacgcgcttcctcttccgttatatctcacaaacgccgttttcttcacgctcttcttctccgtcgcgtattacctcctccaccggtggcgtgacaagatccgttacaatacgcctcttcacgtcgtcactatcacagaactcggcgccattattgctctcatcgcttcgtttatctatctcctagggttttttggtattgactttgttcagtcatttatctcacgtgcctctggtgatgcttgggatctcgccgatacgatcgatgatgatgaccaccgccttgtcacgtgctctccaccgactccgatcgtttccgttgctaaattacctaatccggaacctattgttaccgaatcgcttcctgaggaagacgaggagattgtgaaatcggttatcgacggagttattccatcgtactcgcttgaatctcgtctcggtgattgcaaaagagcggcgtcgattcgtcgtgaggcgttgcagagagtcaccgggagatcgattgaagggttaccgttggatggatttgattatgaatcgattttggggcaatgctgtgagatgcctgttggatacattcagattcctgttgggattgctggtccattgttgcttgatggttatgagtactctgttcctatggctacaaccgaaggttgtttggttgctagcactaacagaggctgcaaggctatgtttatctctggtggcgccaccagtaccgttcttaaggacggtatgacccgagcacctgttgttcggttcgcttcggcgagacgagcttcggagcttaagtttttcttggagaatccagagaactttgatactttggcagtagtcttcaacaggtcgagtagatttgcaagactgcaaagtgttaaatgcacaatcgcggggaagaatgcttatgtaaggttctgttgtagtactggtgatgctatggggatgaatatggtttctaaaggtgtgcagaatgttcttgagtatcttaccgatgatttccctgacatggatgtgattggaatctctggtaacttctgttcggacaagaaacctgctgctgtgaactggattgagggacgtggtaaatcagttgtttgcgaggctgtaatcagaggagagatcgtgaacaaggtcttgaaaacgagcgtggctgctttagtcgagctcaacatgctcaagaacctagctggctctgctgttgcaggctctctaggtggattcaacgctcatgccagtaacatagtgtctgctgtattcatagctactggccaagatccagctcaaaacgtggagagttctcaatgcatcaccatgatggaagctattaatgacggcaaagatatccatatctcagtcactatgccatctatcgaggtggggacagtgggaggaggaacacagcttgcatctcaatcagcgtgtttaaacctgctcggagttaaaggagcaagcacagagtcgccgggaatgaacgcaaggaggctagcgacgatcgtagccggagcagttttagctggagagttatctttaatgtcagcaattgcagctggacagcttgtgagaagtcacatgaaatacaatagatccagccgagacatctctggagcaacgacaacgacaacaacaacaacatga

SEQ ID NO: 95 - protein, 592 aa, Arabidopsis thaliana
MDLRRRPPKPPVTNNNNSNGSFRSYQPRTSDDDHRRRATTIAPPPKASDALPLPLYLTNAVFFTLFFSVAYYLLHRWRDKIRYNTPLHVVTITELGAIIALIASFIYLLGFFGIDFVQSFISRASGDAWDLADTIDDDDHRLVTCSPPTPIVSVAKLPNPEPIVTESLPEEDEEIVKSVIDGVIPSYSLESRLGDCKRAASIRREALQRVTGRSIEGLPLDGFDYESILGQCCEMPVGYIQIPVGIAGPLLLDGYEYSVPMATTEGCLVASTNRGCKAMFISGGATSTVLKDGMTRAPVVRFASARRASELKFFLENPENFDTLAVVFNRSSRFARLQSVKCTIAGKNAYVRFCCSTGDAMGMNMVSKGVQNVLEYLTDDFPDMDVIGISGNFCSDKKPAAVNWIEGRGKSVVCEAVIRGEIVNKVLKTSVAALVELNMLKNLAGSAVAGSLGGFNAHASNIVSAVFIATGQDPAQNVESSQCITMMEAINDGKDIHISVTMPSIEVGTVGGGTQLASQSACLNLLGVKGASTESPGMNARRLATIVAGAVLAGELSLMSAIAAGQLVRSHMKYNRSSRDISGATTTTTTTT

SEQ ID NO: 96 - DNA, 1014 bp, Arabidopsis thaliana
  CDS (1)..(1014): ORF MRN 17.4, Linie 220801
atggtggtgatgaaggcacagccactggttccagcaattttcatatttggtgattcggtggttgatgtgggaaacaacaatgatatctacacaatcgtcaaagctaatttccctccttatggaagagatttcacaacccatacacccaccggacgcttctgcaatggaaagttagctactgacttcaccgctgagaatcttgggttcaaatcatacccacaagcttatctaagcaaaaaggcaaaaggcaagaaccttttgattggagctaatttcgcctctgcagcctctggttattacgatggcacagccaagctctacagtgcaatatcgttgccgcaacagctagaacattacaaagactacattagtcgaatccaagaaatcgcaacctcaaacaacaattcaaacgccagtgccataatctccaatggcatctatatcgtcagcgcagggagcagcgacttcatacaaaactactatatcaaccctctcctctacagagaccaatcacctgatgagttctctgatctccttatcctctcctactccagttttattcagaatttatattcgttaggagcaagaaggatcggagtgactacacttccgcccctcggttgtttaccggcggccataactgtagtgggtccacatgagggtggatgctcggagaagcttaacaacgacgcaatctccttcaacaacaaactcaatacgacgtcacaggatctcaagagaaacctcattggactcaatttagtcgtctttgatatctatcagcctctctatgatcttgccaccaggccatcagaatttggatttgcagaggcaagaagagcttgttgtggaacagggttactagagacatcaatactgtgcaacccaaaatcagtaggaacatgtaacaatgcaactgagtatgtcttttgggacggatttcatccaacggaagctgctaacaagattctcgctgacaatctcttggtctctggcatctctctcatctcctga

SEQ ID NO: 97 - protein, 337 aa, Arabidopsis thaliana
MVVMKAQPLVPAIFIFGDSVVDVGNNNDIYTIVKANFPPYGRDFTTHTPTGRFCNGKLATDFTAENLGFKSYPQAYLSKKAKGKNLLIGANFASAASGYYDGTAKLYSAISLPQQLEHYKDYISRIQEIATSNNNSNASAIISNGIYIVSAGSSDFIQNYYINPLLYRDQSPDEFSDLLILSYSSFIQNLYSLGARRIGVTTLPPLGCLPAAITVVGPHEGGCSEKLNNDAISFNNKLNTTSQDLKRNLIGLNLVVFDIYQPLYDLATRPSEFGFAEARRACCGTGLLETSILCNPKSVGTCNNATEYVFWDGFHPTEAANKILADNLLVSGISLIS

SEQ ID NO: 98 - DNA, 2487 bp, Ara ararauna
  CDS (1)..(2487): ORF d13705c, Linie 224933
atggcagattcaagttcttctctccttcctctttgcgaaaggatttcacacaaaagctacattttaagaattgtcgatctcacaattctcgttcttctcttttctcttctctggtaccgaatcctacatatgtgcgaaaacaacaccatttggcttgtggcttttctctgtgaatcttgtttctcattcatgtggttgattattacctgcataaaatggagtcctgctgaagataaaccctatccaaatagacttgatgaaagggttcatgaccttccttcagtagatatgttcgtgcccacggcagatccggttagggagccgccgattattgttgtgaacactgtgctttcgctattagctgtgaattatccagcgaataaactagcgtgttatgtgtcggacgatggatgttctcctctcacttacttttctctcaaggaagcttctaagttcgttaaaatttgggctcccttctgcaagaaatacaacgttagagttagagctccttttagatatttcttaaaccctttggttgcaacagatgattcagtattcagcaaagattggaaaatgatgaagatttataaggttttttattatgtttatttttgtattaatatgaagagggagtacgtgaagttatgccggaaagttgaagatgccacaggagattcccattggttggatgcagacgatgattttgaagctttctcaaacacaaaaccaaatgatcattcaactattgttaaggtattactaaaattgtttttaaaaactacagtcagggtatttgtacaattttccaaagttatgtacatattaaaacttataatagtggtatgggagaacaagggaggtgtaggagacgagaaagaagtccctcatcttgtatacatttcaagagagaaaagaccaaattaccttcatcattacaaaactggagccatgaactttctggttaacgatttttatcttacacatctctctttttttgatatattaatatatttaaaaataaatgtcaatgattgtagagctgtttctttttgttattatgataaaaatatgatgagcctaatatataattttaaacagttaagagtgtcaggattgatgacaaatgcaccatacatgttgaacgtagactgtgacatgtatgccaatgaaccagatgtggtgcgacaagcaatgtgtgtatttttacaaaactcaaagaactcaaaccattgtgcttttgttcagttccctcaaaacttctatgattcttacaccaacgaacttgtcgtcttacaacattatatgaaacgaggagttgcgggaatccaaggaccgatatatattggatcaggctgcttccacactagaagagttatgtacggtttatcttcagacgatttagaagacgatggaagtctttcttcggttgcttcaagggagtttttgtccgaggatagtttagtgaggaaatatgggagttccaaagagttggtgaaatcagtggtggatgcattgcaaagaaaatcaaacccccaaaaaagtcttgcaaacctcgtagaagcggcccaagaagtggggcattgtcactacgagtaccaaaccagttggggcaacctcggttggttatatgattcagtggcagaagatacaaacacgagtattggaatccatttgagaggatggactagttcattcatttctccggaccctcccgcgtttctaggatcaactccgtcggtaggaccagaggcgatagtccaacaccggcgatgggcaacgggatcgatcgaagtcctttttaacaaacaaagtccgttgatcggtttccgtcggaaaataaaattccgacaaagattagcttatttttgggttctcatgtgtataaggtcaatccctgagctcgtgtactgtctcttgcctgcttattgcctactcaacaactctgccttgtttcccaagggaccttgtctaggcataatagtcacacttgtggggatgcattgtctctacactctatggcaattcatgatccttggtttttcggtaaaatcgtgttggttatttagcatccaagatatcatactcaagcttcttggaatctcgaaaatcggttttatagtcgcgaaaaagaatatgcctgagactaggtcaggatatgaatctaaatctaaaccatctcaaggagaagatgatggtctaaaattagagttagctggttttttggttcgtctacaacggtcaagttatagtcatggaggaggaggtggttcggctttggcagagacttgtggatgtgctatgattgtttttggtgaaaatgatggatctcaagaaggtcttgaattgcctaaacttaactcaaagagaggtatctcctcaattgttgaaaaaacgtttgtggcatgcatcttaccatttgtaagaaatcataaagtaaatgaaaaaaaaaatcaccacattaatatagatagaccaaatttgttgtga

SEQ ID NO: 99 - protein, 828 aa, Ara ararauna
MADSSSSLLPLCERISHKSYILRIVDLTILVLLFSLLWYRILHMCENNTIWLVAFLCESCFSFMWLIITCIKWSPAEDKPYPNRLDERVHDLPSVDMFVPTADPVREPPIIVVNTVLSLLAVNYPANKLACYVSDDGCSPLTYFSLKEASKFVKIWAPFCKKYNVRVRAPFRYFLNPLVATDDSVFSKDWKMMKIYKVFYYVYFCINMKREYVKLCRKVEDATGDSHWLDADDDFEAFSNTKPNDHSTIVKVLLKLFLKTTVRVFVQFSKVMYILKLIIVVWENKGGVGDEKEVPHLVYISREKRPNYLHHYKTGAMNFLVNDFYLTHLSFFDILIYLKINVNDCRAVSFCYYDKNMMSLIYNFKQLRVSGLMTNAPYMLNVDCDMYANEPDVVRQAMCVFLQNSKNSNHCAFVQFPQNFYDSYTNELVVLQHYMKRGVAGIQGPIYIGSGCFHTRRVMYGLSSDDLEDDGSLSSVASREFLSEDSLVRKYGSSKELVKSVVDALQRKSNPQKSLANLVEAAQEVGHCHYEYQTSWGNLGWLYDSVAEDTNTSIGIHLRGWTSSFISPDPPAFLGSTPSVGPEAIVQHRRWATGSIEVLFNKQSPLIGFRRKIKFRQRLAYFWVLMCIRSIPELVYCLLPAYCLLNNSALFPKGPCLGIIVTLVGMHCLYTLWQFMILGFSVKSCWLFSIQDIILKLLGISKIGFIVAKKNMPETRSGYESKSKPSQGEDDGLKLELAGFLVRLQRSSYSHGGGGGSALAETCGCAMIVFGENDGSQEGLELPKLNSKRGISSIVEKTFVACILPFVRNHKVNEKKNHHINIDRPNLL

SEQ ID NO: 100 - DNA, 2043 bp, Arabidopsis thaliana
  CDS (1)..(2043): ORF K5J14.11, Linie 229091
atgcttctcttgcaacaaccaccactggtttcaactagatttcactctctctacttcctcactcaccaccaccaccaccaccaccgcttcttccaaccaccaatctcagctttctctgcaacaacctctgcttctttaccttcaccatctccacgctacgacttctctccactcctaaaattcctctcaagattcggaccagtcgagttagctctagattcggaatcggaatcagaagcttcaccggaatcgcttaatccggtagagttcgatctcgtcgagtcatacagagcagtaccagcaccatactggcactctctgataaaatcgttaacctcatcaacatcatctcttggtttagcttacgctgtagtgtcatggctacaaaaacataacctctgtttctcctacgagcttctttactcgattctcatccacgcgcttggccgttccgagaagctttacgaggcgtttcttctctctcagaaacaaacgttaacaccattgacatacaatgccttgattggtgcttgtgctcggaacaacgatatcgaaaaagctcttaatttgatcgctaagatgcgtcaagacggttatcaatccgattttgttaactatagtttggttattcagtcgttgactcgtagcaataagattgattctgttatgttgttgagattgtataaagagattgaaagagataagcttgagcttgatgtgcagttagttaatgatattattatgggttttgctaagtctggtgatccttctaaggctttgcagcttcttggtatggctcaagcgacgggtttgagtgcgaaaaccgctactcttgtatcgattatctctgcgttggcggattcagggaggactttggaggctgaagctttgtttgaggagttgagacagagtgggattaagcctagaacgagagcttacaatgcgttgcttaaagggtatgtgaagacgggtcctttgaaagacgcagagtcaatggtttctgagatggagaagcgaggtgtttcgcctgatgaacatacgtatagtctgcttatcgatgcgtatgttaatgcaggtagatgggaaagtgcgagaattgtgttgaaagagatggaagctggtgatgtacagcctaattcttttgttttcagtagactcttagctggttttcgcgatagaggtgaatggcagaagacatttcaagttcttaaagagatgaagagtatcggtgttaagcccgatagacagttttataacgtggtgatcgatacctttgggaagtttaattgtcttgatcatgccatgacgactttcgatagaatgttaagcgaaggtattgaaccagatagggtgacttggaatacgcttattgattgtcattgtaagcatggtcggcatatcgtagcggaagagatgttcgaggcgatggagaggcgagggtgtttgccttgtgctacaacttataacattatgatcaatagttatggtgatcaagaaagatgggatgatatgaaaagattgttgggaaagatgaagagccaaggtatcctgcctaatgttgtgacacacactacacttgtcgacgtttatggcaaatcgggtaggtttaatgatgcgatagagtgcttggaagagatgaagtcggttgggttgaaaccatcatcgaccatgtacaatgccctcatcaatgcatatgcacaaaggggtttatcggaacaagctgtgaatgcatttagagtgatgacatcggatggactaaagccgagtttattggctctcaattcgctcatcaatgcctttggtgaggatagaagagacgctgaagcctttgccgtgttacagtacatgaaagaaaatggcgtaaaaccagacgtggtcacttacacaacactcatgaaagctctcattcgtgttgataagtttcagaaggtaccggttgtttacgaggagatgatcatgtcaggatgcaaaccagatagaaaagctagatccatgttacggtcagctctaagatacatgaagcagacgttaagagcctcatag

SEQ ID NO: 101 - protein, 680 aa, Arabidopsis thaliana
MLLLQQPPLVSTRFHSLYFLTHHHHHHHRFFQPPISAFSATTSASLPSPSPRYDFSPLLKFLSRFGPVELALDSESESEASPESLNPVEFDLVESYRAVPAPYWHSLIKSLTSSTSSLGLAYAVVSWLQKHNLCFSYELLYSILIHALGRSEKLYEAFLLSQKQTLTPLTYNALIGACARNNDIEKALNLIAKMRQDGYQSDFVNYSLVIQSLTRSNKIDSVMLLRLYKEIERDKLELDVQLVNDIIMGFAKSGDPSKALQLLGMAQATGLSAKTATLVSIISALADSGRTLEAEALFEELRQSGIKPRTRAYNALLKGYVKTGPLKDAESMVSEMEKRGVSPDEHTYSLLIDAYVNAGRWESARIVLKEMEAGDVQPNSFVFSRLLAGFRDRGEWQKTFQVLKEMKSIGVKPDRQFYNVVIDTFGKFNCLDHAMTTFDRMLSEGIEPDRVTWNTLIDCHCKHGRHIVAEEMFEAMERRGCLPCATTYNIMINSYGDQERWDDMKRLLGKMKSQGILPNVVTHTTLVDVYGKSGRFNDAIECLEEMKSVGLKPSSTMYNALINAYAQRGLSEQAVNAFRVMTSDGLKPSLLALNSLINAFGEDRRDAEAFAVLQYMKENGVKPDVVTYTTLMKALIRVDKFQKVPVVYEEMIMSGCKPDRKARSMLRSALRYMKQTLRAS

SEQ ID NO: 102 - DNA, 2361 bp, Arabidopsis thaliana
  CDS (1)..(2361): ORF F4F7.26, Linie 246473
atggttctcaaagacgataactccgagaaatctattgagctcttcattagtattggtttggacgagaaaacagctcgtaataccatcaataataacaaggtcaccgccaatctcaccgccgttatccacgaggctgctgttactgatgggtgcgatcgaaatactggcaatctgttatactcggtcgctactaagttccctacaaatgctcttgtgcatcgccctacattgctcaagtacattgttaactctaagattaaaactccagcccaattggaagctgcatttgccttttttgccagtaccggtcctgaggactttaagctgaatgagtttgaagaggcatgtggtgttgggattgaagtttccccagaagatattgagaaagcagttaaaggaatctttgaagagaataagaaaacaatattggagcagcgctatcgaactaatgtgggtgaattatttggacatgtccggaaaagtttgccatgggccgatcctaagattgtaaagaaactcatagatgagaaaatgtatgagctgcttggtgagaaaaccgctgctgataatgaaaaacctacaaaaaagaaggagaagaaggagaagcctgccaaagtcgaggaaaagaaagctgtggtggaaactaccgcagagccatctgaagaggagcttaatccatatactatattccctcagccagaacaaaattttatggttcacacagaagtgtttttcagtgatggctctattctcagatgtagcaatacaaaggaagtacttgacaaacatctcaaggtgactggagggaaagtttatactcggttcccccctgaaccaaatggttatcttcatattggacatgccaaggctatgtttgttgattttggtcttgcaaaggagcgagggggttgctgttatctaaggtatgatgatacaaatccagaggcagaaaaggaagagtatattaatcatattgaagaaattgttaagtggatgggttgggaacccttcaaggaactgtatgatttggcagtggagttgattcggagaggtcatgcttatgttgatcatcagactgctgatgagataaaagagtacagagagaagaaaatgaacagcccctggagggacagacctattgaagaatctctaaaactttttgatgaaatgagacgaggcatcattgaggaagggaaggcaaccctaagaatgaagcaagatatgcagagtgacaattttaatatgtatgatcttattgcctatcgaataaagttcgcacctcatcctaaggctggtgacaagtggtgtatctatccgagttatgattatgcccactgcactgttgattctcttgagaatataacgcattcgctctgtactcttgaatttgaaacccggcgtgcttcatactattggctgttacattccctgagtctctacatgccatatgtgtgggaatattcacggttgaatgtgacaaacactgtaatgtccaagcgtaagttgaattacatagtgacaaacaagtatgttgatggttgggatgatccacgtcttttgacactttctggtttgagacggaggggtgtgacttcaactgcgattaatgcatttgtacgaggcattgggattactagaagtgatggtagcatgatacacgtaagtcgtcttgagcatcatattagagaggaattgaataaaacagcccctcgcaccatggtggtgcttaatcctcttaaagtggtcatcaccaatttggaatcagacaagcttatagagcttgatgccaaaaggtggcctgatgctcagaacgatgatccctcagcattctacaaggtaccgttctctagagttgtatacattgaccaatctgacttccgaatgaaggattcaaaagattattatgggctcgcccctggtaaatctgttttgctaagatatgctttcccaatcaagtgcaccaatgttgtctttgctgatgacaatgaaaccgttcgtgagattcatgcggaatatgaccccgagaaaaagtcaaagccaaagggggttctacactgggtcgctgaatcttccccaggagaagagcccataaaggtggaagtccgattatttgagaaactctttaactccgagaacccggctgaactcaatgatgcttggctcactgacattaacccaaactctaaaatggtaatttctggtgcctatgctgtatcaacccttaaagatgctgcagttggggacagattccaattcgagaggctaggttattacgcggtggacaaggactctgagccaggaaagcttgtgttcaaccggacggtcacactcagagacagctacgggaaaggtggaaagtaa

SEQ ID NO: 103 - protein, 786 aa, Arabidopsis thaliana
MVLKDDNSEKSIELFISIGLDEKTARNTINNNKVTANLTAVIHEAAVTDGCDRNTGNLLYSVATKFPTNALVHRPTLLKYIVNSKIKTPAQLEAAFAFFASTGPEDFKLNEFEEACGVGIEVSPEDIEKAVKGIFEENKKTILEQRYRTNVGELFGHVRKSLPWADPKIVKKLIDEKMYELLGEKTAADNEKPTKKKEKKEKPAKVEEKKAVVETTAEPSEEELNPYTIFPQPEQNFMVHTEVFFSDGSILRCSNTKEVLDKHLKVTGGKVYTRFPPEPNGYLHIGHAKAMFVDFGLAKERGGCCYLRYDDTNPEAEKEEYINHIEEIVKWMGWEPFKELYDLAVELIRRGHAYVDHQTADEIKEYREKKMNSPWRDRPIEESLKLFDEMRRGIIEEGKATLRMKQDMQSDNFNMYDLIAYRIKFAPHPKAGDKWCIYPSYDYAHCTVDSLENITHSLCTLEFETRRASYYWLLHSLSLYMPYVWEYSRLNVTNTVMSKRKLNYIVTNKYVDGWDDPRLLTLSGLRRRGVTSTAINAFVRGIGITRSDGSMIHVSRLEHHIREELNKTAPRTMVVLNPLKVVITNLESDKLIELDAKRWPDAQNDDPSAFYKVPFSRVVYIDQSDFRMKDSKDYYGLAPGKSVLLRYAFPIKCTNVVFADDNETVREIHAEYDPEKKSKPKGVLHWVAESSPGEEPIKVEVRLFEKLFNSENPAELNDAWLTDINPNSKMVISGAYAVSTLKDAAVGDRFQFERLGYYAVDKDSEPGKLVFNRTVTLRDSYGKGGK

SEQ ID NO: 104 - DNA, 1503 bp, Arabidopsis thaliana
  CDS (1)..(1503): ORF MFB13.17, Linie 304139
atggttggtctaactccagctgaggatcgttcagagattgcctttttcgacgtcgagacgacaattccgttccgagttggtcaggggtacgcgattctggagtttggatcgattctggtttgccccaagaagcttgtggagctgaaaaactactctgttctggttcgtcctgctaatctcaacctcatcacgcctcggtccgtgaagtgcaacggcatcaaacgcgaagacgtcgaatcagctcttacctttgcagatatcgccgacaccgtctacgatattctccatggaaggatatgggcaggtcataacatattgaagttcgattgtccaaggataagagaagcatttgctgagattggacgagatccaccagagccaaagggcaccattgactccttggctttgcttactcaaaggtttgggagaagagctggtgatatgaagatggcgactttggctacatactttggacttggaaaccagacgcataggagtctggacgatgtaaggatgaacttcgaggttctcaagtattgtgccactgttttgttcttggtatgctctctttacgagctaattcagaaacatgccatttttcaacaggagtcaagtcttccagatgaacttatagagaactcggttactactactactcctgaaactagttcaagaaggcgtaggactataaaaaaatctcctctgcaatctcccactgatcagcagacaggagagaacatgacaactatacctattttatcatttgtttcatccgcagaagctcaaacggatccatttgatatgagcactttgaggaacgaaatagcccctgaagttcttcaatcagatgttcccatggaagaagaacaaaatcagcagtctgagactgttgcctctgaaggtaccggtgaccaggaaggattcatggagctagataaaatatctgtttcaagtatcagagcaactcatgtcccgctatatgacgggagccaaacaatgaagctgcaactcttccttggggacagaccccttcagctccattgtcctcgtctgaaagtacggtttggaatcaatgggaaatttatggataaagctggaagacggaggttgaactttgtaattgatctgtatccaagtctctgcaacgtacttcaagaatgcgacagtgctgcacagacaatatctgttgattcaggcagtggttctgactggaaccctctagtcattccaatgaaaggatttctgaactgtcccactgcaaggatacatatacccacagagttaaatggagatatagatcggtacgcagctgagatacaccagaaagagttctctggagctactgctactcagaaactcatttctagcaaccccaaggctgaagagattgagtctttgttgaatccgagaactgttcttgacgctttcttgtctctggagccatatgattatcagcagagagccggaatccgtctagttgctagaaagcttgttatacattag

SEQ ID NO: 105 - protein, 500 aa, Arabidopsis thaliana
MVGLTPAEDRSEIAFFDVETTIPFRVGQGYAILEFGSILVCPKKLVELKNYSVLVRPANLNLITPRSVKCNGIKREDVESALTFADIADTVYDILHGRIWAGHNILKFDCPRIREAFAEIGRDPPEPKGTIDSLALLTQRFGRRAGDMKMATLATYFGLGNQTHRSLDDVRMNFEVLKYCATVLFLVCSLYELIQKHAIFQQESSLPDELIENSVTTTTPETSSRRRRTIKKSPLQSPTDQQTGENMTTIPILSFVSSAEAQTDPFDMSTLRNEIAPEVLQSDVPMEEEQNQQSETVASEGTGDQEGFMELDKISVSSIRATHVPLYDGSQTMKLQLFLGDRPLQLHCPRLKVRFGINGKFMDKAGRRRLNFVIDLYPSLCNVLQECDSAAQTISVDSGSGSDWNPLVIPMKGFLNCPTARIHIPTELNGDIDRYAAEIHQKEFSGATATQKLISSNPKAEEIESLLNPRTVLDAFLSLEPYDYQQRAGIRLVARKLVIH

SEQ ID NO: 106 - DNA, 984 bp, Arabidopsis thaliana
  CDS (1)..(984): ORF At2g01110, Linie 304886
atgacggagatagagagtagaaggaagcagggttcgacatacagcagctttgccagagccgcgagggccgagaagcaacatcgagttgttgcatccctccgtgatagagctctcaatgacgacgattcaccaacagagaccacccccggcgttggctctgctgtagaagacagaccaccagttagtgatgaattacacactgctgctgtggcagattcatctgaagatagatcaagttcggtctatgagtttctgtatccccgtaaagaggagctccctgatgacaaagaaatgactattttcgaccatctcgaggagctccgggagagaatattcgtctctgttttggctgtaggagctgcaatcttgggatgcttcgccttctccaaagatcttattgtctttcttgaagctcccgtcaaaactcagggtgtacggtttctccagcttgctcctggcgaatttttcttcacaactttaaaggtctccggttattgcgggcttctactagggagcccagtgatcctgtatgagattatagcttttgtccttcccggtctgacacgggctgagagaaggtttctggggccaattgtatttggctcctcattgctcttctatgctggacttgctttctcctactgggttttaacccctgcagccttgaatttctttgtgaattacgctgaaggtgtggtagaatctctgtggtctatcgaccagtactttgagtttgtactagtgcttatgttcagcacaggcctttctttccaggttccagtcattcagttactcctgggacaagtaggggttgtgtcgggagatcaaatgctatcaatttggagatatgtggtggtaggtgcggtggttgcagcagctgttgtcacaccctcgacagaccctgtcactcaaatgctcctagcaacaccgcttctggggctctacttgggtggtgcatggatggtcaagctcacaggtcggtga

SEQ ID NO: 107 - protein, 327 aa, Arabidopsis thaliana
MTEIESRRKQGSTYSSFARAARAEKQHRVVASLRDRALNDDDSPTETTPGVGSAVEDRPPVSDELHTAAVADSSEDRSSSVYEFLYPRKEELPDDKEMTIFDHLEELRERIFVSVLAVGAAILGCFAFSKDLIVFLEAPVKTQGVRFLQLAPGEFFFTTLKVSGYCGLLLGSPVILYEIIAFVLPGLTRAERRFLGPIVFGSSLLFYAGLAFSYWVLTPAALNFFVNYAEGVVESLWSIDQYFEFVLVLMFSTGLSFQVPVIQLLLGQVGVVSGDQMLSIWRYVVVGAVVAAAVVTPSTDPVTQMLLATPLLGLYLGGAWMVKLTGR

SEQ ID NO: 108 - DNA, 1698 bp, Arabidopsis thaliana
  CDS (1)..(1698): ORF F28J12.180, Linie 306053
atgttttcgttatcgttaatccaaccgcgtctccggatttcagagattccggtgactcaatcctacaaatctccgacgatatgttacagtagcgattcaagaactaagcgagaggaacagagacacgtgagattacctgggtttcgattagtttctggaaagagagcatctttcgattcgggttttagtggtttcaaaggagagaatgtgaatcaggatgattcgtcttctttcgatagcgaaagagttgattatgctctgttagcggagtggctacagtcttctaatgggatgcgactcattaaaaggatccatgcgatggcgttgaaacttggtgatttggtttatgcacgtaaagtgttcgacagtatgcctgagaaaaatactgttacttggactgctatgattgatgggtatttgaagtatggtcttgaggatgaggcttttgcactgtttgaggattatgtgaagcatggaatacgttttacgaacgagaggatgtttgtgtgtttgttgaatctgtgtagtaggagagcagagtttgagttagggagacaagttcatggtaatatggtgaaagttggagtggggaatctcattgtggagagttctcttgtttatttttatgcgcaatgcggtgaattgacaagtgcgttacgagcttttgatatgatggaggagaaagatgtgatatcttggactgctgttatatcggcgtgttcgagaaaagggcatggaattaaagctataggcatgtttatcggaatgttgaatcactggtttttgcctaacgagtttacggtgtgcagtattttgaaggcttgtagtgaggagaaagcgttaagattcggaaggcaagtacacagcttggttgttaagaggatgataaagacagatgtttttgtgggaacttcgctgatggacatgtatgctaagtgtggggagatttctgattgcagaaaagtgtttgatggaatgagtaatagaaacacggtcacatggacttcgattatagctgctcatgctcgggaaggttttggtgaggaagctatcagcctcttccggataatgaagaggcggcatttgattgctaacaatttgacagtagaacttcatgcacagattatcaagaattcgatcgaaaagaatgtctatataggaagtactttggtgtggctgtattgtaaatgcggagaatctcgtgacgctttcaatgttctccagcaattgccatctagagatgtggtttcatggaccgctatgatctctggatgttcgagcttaggacatgaatcggaagcgctagacttcttgaaagagatgattcaagaaggtgtagagccaaacccatttacatactcctcggctttaaaagcttgtgcgaattcagaatctcttcttatcggtagatcaatccattccattgcaaagaagaatcatgctctatcaaatgtctttgtgggaagtgctttgattcacattatgcctgagaagaacttggtttcatggaaggcgatgataatgggttatgcgaggaatgggttttgcagggaagcattgaagctaatgtatagaatggaggcagagggatttgaagttgatgattatatatttgcaacaattctctctacttgtggagatattgagctcgatgaagctgttgaatcttctgcaacttgttacttggagacatcttga

SEQ ID NO: 109 - protein, 565 aa, Arabidopsis thaliana
MFSLSLIQPRLRISEIPVTQSYKSPTICYSSDSRTKREEQRHVRLPGFRLVSGKRASFDSGFSGFKGENVNQDDSSSFDSERVDYALLAEWLQSSNGMRLIKRIHAMALKLGDLVYARKVFDSMPEKNTVTWTAMIDGYLKYGLEDEAFALFEDYVKHGIRFTNERMFVCLLNLCSRRAEFELGRQVHGNMVKVGVGNLIVESSLVYFYAQCGELTSALRAFDMMEEKDVISWTAVISACSRKGHGIKAIGMFIGMLNHWFLPNEFTVCSILKACSEEKALRFGRQVHSLVVKRMIKTDVFVGTSLMDMYAKCGEISDCRKVFDGMSNRNTVTWTSIIAAHAREGFGEEAISLFRIMKRRHLIANNLTVELHAQIIKNSIEKNVYIGSTLVWLYCKCGESRDAFNVLQQLPSRDVVSWTAMISGCSSLGHESEALDFLKEMIQEGVEPNPFTYSSALKACANSESLLIGRSIHSIAKKNHALSNVFVGSALIHIMPEKNLVSWKAMIMGYARNGFCREALKLMYRMEAEGFEVDDYIFATILSTCGDIELDEAVESSATCYLETS

1. A method of identifying herbicidally active substances, which comprises influencing the expression or the activity of the gene product of a nucleic acid or of a gene encompassing:
aa) nucleic acid sequence with the sequence shown in SEQ ID NO: 1, SEQ ID NO: 3, SEQ ID NO: 5, SEQ ID NO: 7, SEQ ID NO: 9, SEQ ID NO: 11, SEQ ID NO: 13, SEQ ID NO: 15, SEQ ID NO: 17, SEQ ID NO: 26, SEQ ID NO: 28, SEQ ID NO: 30, SEQ ID NO: 32, SEQ ID NO: 34, SEQ ID NO: 36, SEQ ID NO: 38, SEQ ID NO: 40, SEQ ID NO: 44, SEQ ID NO: 46, SEQ ID NO: 48, SEQ ID NO: 50, SEQ ID NO: 52, SEQ ID NO: 54, SEQ ID NO: 56, SEQ ID NO: 58, SEQ ID NO: 60, SEQ ID NO: 62, SEQ ID NO: 64, SEQ ID NO: 66, SEQ ID NO: 68, SEQ ID NO: 70, SEQ ID NO: 72, SEQ ID NO: 74, SEQ ID NO: 76, SEQ ID NO: 78, SEQ ID NO: 80, SEQ ID NO: 82, SEQ ID NO: 84, SEQ ID NO: 86, SEQ ID NO: 88, SEQ ID NO: 90, SEQ ID NO: 92, SEQ ID NO: 94, SEQ ID NO: 96, SEQ ID NO: 98, SEQ ID NO: 100, SEQ ID NO: 102, SEQ ID NO: 106 or SEQ ID NO: 108
or
bb) nucleic acid sequence which, owing to the degeneracy of the genetic code, can be derived by back translation from the amino acid sequences shown in SEQ ID NO: 2, SEQ ID NO: 4, SEQ ID NO: 6, SEQ ID NO: 8, SEQ ID NO: 10, SEQ ID NO: 12, SEQ ID NO: 14, SEQ ID NO: 16, SEQ ID NO: 18, SEQ ID NO: 27, SEQ ID NO: 29, SEQ ID NO: 31, SEQ ID NO: 33, SEQ ID NO: 35, SEQ ID NO: 37, SEQ ID NO: 39, SEQ ID NO: 41, SEQ ID NO: 45, SEQ ID NO: 47, SEQ ID NO: 49, SEQ ID NO: 51, SEQ ID NO: 53, SEQ ID NO: 55, SEQ ID NO: 57, SEQ ID NO: 59, SEQ ID NO: 61, SEQ ID NO: 63, SEQ ID NO: 65, SEQ ID NO: 67, SEQ ID NO: 69, SEQ ID NO: 71, SEQ ID NO: 73, SEQ ID NO: 75, SEQ ID NO: 77, SEQ ID NO: 79, SEQ ID NO: 81, SEQ ID NO: 83, SEQ ID NO: 85, SEQ ID NO: 87, SEQ ID NO: 89, SEQ ID NO: 91, SEQ ID NO: 93, SEQ ID NO: 95, SEQ ID NO: 97, SEQ ID NO: 99, SEQ ID NO: 101, SEQ ID NO: 103, SEQ ID NO: 105, SEQ ID NO: 107 or SEQ ID NO: 109;
cc) nucleic acid sequence which is a derivative or a fragment of the nucleic acid sequences shown in SEQ ID NO: 1, SEQ ID NO: 3, SEQ ID NO: 5, SEQ ID NO: 7 SEQ ID NO: 9, SEQ ID NO: 11, SEQ ID NO: 13, SEQ ID NO: 15, SEQ ID NO: 17, SEQ ID NO: 26, SEQ ID NO: 28, SEQ ID NO: 30, SEQ ID NO: 32, SEQ ID NO: 34, SEQ ID NO: 36, SEQ ID NO: 38, SEQ ID NO: 40, SEQ ID NO: 44, SEQ ID NO: 46, SEQ ID NO: 48, SEQ ID NO: 50, SEQ ID NO: 52, SEQ ID NO: 54, SEQ ID NO: 56, SEQ ID NO: 58, SEQ ID NO: 60, SEQ ID NO: 62, SEQ ID NO: 64, SEQ ID NO: 66, SEQ ID NO: 68, SEQ ID NO: 70, SEQ ID NO: 72, SEQ ID NO: 74, SEQ ID NO: 76, SEQ ID NO: 78, SEQ ID NO: 80, SEQ ID NO: 82, SEQ ID NO: 84, SEQ ID NO: 86, SEQ ID NO: 88, SEQ ID NO: 90, SEQ ID NO: 92, SEQ ID NO: 94, SEQ ID NO: 96, SEQ ID NO: 98, SEQ ID NO: 100, SEQ ID NO: 102, SEQ ID NO: 106 or SEQ ID NO: 108 and which has at least 60% homology at the nucleic acid level;
dd) nucleic acid sequence which encodes derivatives or fragments of the polypeptides with the amino acid sequences shown in SEQ ID NO: 2, SEQ ID NO: 4, SEQ ID NO: 6, SEQ ID NO: 8, SEQ ID NO: 10, SEQ ID NO: 12, SEQ ID NO: 14, SEQ ID NO: 16, SEQ ID NO: 18, SEQ ID NO: 27, SEQ ID NO: 29, SEQ ID NO: 31, SEQ ID NO: 33, SEQ ID NO: 35, SEQ ID NO: 37, SEQ ID NO: 39, SEQ ID NO: 41, SEQ ID NO: 45, SEQ ID NO: 47, SEQ ID NO: 49, SEQ ID NO: 51, SEQ ID NO: 53, SEQ ID NO: 55, SEQ ID NO: 57, SEQ ID NO: 59, SEQ ID NO: 61, SEQ ID NO: 63, SEQ ID NO: 65, SEQ ID NO: 67, SEQ ID NO: 69, SEQ ID NO: 71, SEQ ID NO: 73, SEQ ID NO: 75, SEQ ID NO: 77, SEQ ID NO: 79, SEQ ID NO: 81, SEQ ID NO: 83, SEQ ID NO: 85, SEQ ID NO: 87, SEQ ID NO: 89, SEQ ID NO: 91, SEQ ID NO: 93, SEQ ID NO: 95, SEQ ID NO: 97, SEQ ID NO: 99, SEQ ID NO: 101, SEQ ID NO: 103, SEQ ID NO: 105, SEQ ID NO: 107 or SEQ ID NO: 109
which have at least 50% homology at the amino acid level;
ee) nucleic acid sequence which encodes a fragment or an epitope of a polypeptide which specifically binds to an antibody, the antibody binding specifically to a polypeptide encoded by the sequence shown in SEQ ID NO: 1, SEQ ID NO: 3, SEQ ID NO: 5, SEQ ID NO: 7, SEQ ID NO: 9, SEQ ID NO: 11, SEQ ID NO: 13, SEQ ID NO: 15, SEQ ID NO: 17, SEQ ID NO: 26, SEQ ID NO: 28, SEQ ID NO: 30, SEQ ID NO: 32, SEQ ID NO: 34, SEQ ID NO: 36, SEQ ID NO: 38, SEQ ID NO: 40, SEQ ID NO: 44, SEQ ID NO: 46, SEQ ID NO: 48, SEQ ID NO: 50, SEQ ID NO: 52, SEQ ID NO: 54, SEQ ID NO: 56, SEQ ID NO: 58, SEQ ID NO: 60, SEQ ID NO: 62, SEQ ID NO: 64, SEQ ID NO: 66, SEQ ID NO: 68, SEQ ID NO: 70, SEQ ID NO: 72, SEQ ID NO: 74, SEQ ID NO: 76, SEQ ID NO: 78, SEQ ID NO: 80, SEQ ID NO: 82, SEQ ID NO: 84, SEQ ID NO: 86, SEQ ID NO: 88, SEQ ID NO: 90, SEQ ID NO: 92, SEQ ID NO: 94, SEQ ID NO: 96, SEQ ID NO: 98, SEQ ID NO: 100, SEQ ID NO: 102, SEQ ID NO: 106 or SEQ ID NO: 108;
ff) nucleic acid sequence which encodes a fragment of a nucleic acid shown in aa) and which has m6A-methyltransferase activity, DNA-binding activity or DNA repair activity, for example as in the case of RAD 54, thioredoxin activity, VAV2 activity, fructokinase activity, zinc finger protein activity, LYTB activity, crepopin activity, leucine protein activity, DNAJ activity, CRS1 activity, alanyl-tRNA-synthetase activity, OEP86 activity, FMRF-amide-propeptide isolog activity, 26S proteosome subunit S5B activity, geranylgeranyl-pyrophosphate synthase activity, cecropin family signature, ftsH chloroplast protease activity, AIM1 activity, UDP-glucuronyl transferase activity, FPF1 activity, SHI-like zinc finger protein activity, Crp1 activity, CRS1 activity, translation releasing factor RF-1 activity, farnesyl transferase subunit A activity, ATP-dependent copper transporter RAN1 activity, syntaxin or syntaxin-like-protein activity, inositol-polyphosphate-5′-phosphatase activity, UDP—N-acetylmuramoylalanyl-D-glutamate-2,6-diamino-pimelate ligase activity (murE), β-glucosidase activity, hydroxymethylglutaryl-CoA reductase activity, GDSL-motif-lipase/hydroxylase-like-protein activity, cellulose-synthase-like-protein activity, tRNA-glutamine synthetase activity, exonuclease-like-protein activity, sec-independent translocase protein TATC activity or selenium-binding-protein-like-protein activity; and/or
gg) nucleic acid sequence which encodes derivatives of the polypeptides with the amino acid sequences shown in SEQ ID NO: 2, SEQ ID NO: 4, SEQ ID NO: 6, SEQ ID NO: 8, SEQ ID NO: 10, SEQ ID NO: 12, SEQ ID NO: 14, SEQ ID NO: 16, SEQ ID NO: 18, SEQ ID NO: 27, SEQ ID NO: 29, SEQ ID NO: 31, SEQ ID NO: 33, SEQ ID NO: 35, SEQ ID NO: 37, SEQ ID NO: 39, SEQ ID NO: 41, SEQ ID NO: 45, SEQ ID NO: 47, SEQ ID NO: 49, SEQ ID NO: 51, SEQ ID NO: 53, SEQ ID NO: 55, SEQ ID NO: 57, SEQ ID NO: 59, SEQ ID NO: 61, SEQ ID NO: 63, SEQ ID NO: 65, SEQ ID NO: 67, SEQ ID NO: 69, SEQ ID NO: 71, SEQ ID NO: 73, SEQ ID NO: 75, SEQ ID NO: 77, SEQ ID NO: 79, SEQ ID NO: 81, SEQ ID NO: 83, SEQ ID NO: 85, SEQ ID NO: 87, SEQ ID NO: 89, SEQ ID NO: 91, SEQ ID NO: 93, SEQ ID NO: 95, SEQ ID NO: 97, SEQ ID NO: 99, SEQ ID NO: 101, SEQ ID NO: 103, SEQ ID NO: 105, SEQ ID NO: 107 or SEQ ID NO: 109 which has at least 20% homology at the amino acid level and an equivalent biological activity; or
the expression or activity of an amino acid sequence which is encoded by a nucleic acid sequence of aa) to gg),
and selecting the substances which reduce or block the expression or the activity.

2. A method as claimed in claim 1, wherein the expression or the activity of the nucleic acid or amino acid is reduced or blocked by reducing or blocking the
a) transcription,
b) translation,
c) processing and/or
d) modification
of the nucleic acid sequence or amino acid sequence in claim 1.

3. A method as claimed in claim 1, wherein the substances are identified in a high-throughput screening (HTS).

4. A method as claimed in claim 1, wherein the substances selected are applied to a plant in order to test the herbicidal activity of the substances and those substances which show herbicidal activity are selected.

5. A method as claimed in claim 1, wherein the method is carried out in an organism.

6. A method as claimed in claim 1, wherein the organisms used are bacteria, yeasts, fungi or plants.

7. A method as claimed in claim 1, wherein an organism is used which is a conditional or natural mutant of one of the sequences described in claim 1.

8. A nucleic acid construct comprising a nucleic acid sequence shown in claim 1, wherein the nucleic acid sequence is linked to one or more regulatory signals.

9. A substance identified by a method as claimed in claim 1, the substance having a molecular weight of under 1000 Daltons, a Ki value of under 1 mM and less than three hydroxyl groups on a carbon-atom-containing ring.

10. A substance identified by a method as claimed in claim 1, wherein the substance is a proteinogenic substance or an antisense RNA.

11. A substance as claimed in claim 1, wherein the substance is a proteinogenic substance, and which substance is an antibody against the protein encoded by one of the sequences shown in claim 8.

12. A nucleic acid construct as claimed in claim 8, wherein additional further nucleic acid sequences are present in the nucleic acid construct.

13. A vector comprising a nucleic acid construct as claimed in claim 8.

14. An organism comprising at least one nucleic acid construct as claimed in claim 8 or at least one vector comprising the nucleic acid construct.

15. An organism as claimed in claim 14, which is a plant, a microorganism or an animal.

16. A transgenic plant comprising a functional or nonfunctional nucleic acid construct as claimed in claim 8 or a vector comprising the nucleic acid construct.

17. (canceled)

18. A method of identifying an antagonist of proteins which are encoded by a nucleic acid sequence as set forth in claim 8 by following through the following process steps:
i contacting cells which express the protein, or the protein, with a candidate substance;
ii assaying the biological activity of the protein;
iii comparing the biological activity of the protein with a standard activity in the absence of the candidate substance, a reduced biological activity of the protein indicating that the candidate substance is an antagonist.

19. A method as claimed in claim 18, wherein the antagonist identified in accordance with claim 18, iii), is applied to a plant to test its herbicidal activity, and those antagonists which show a herbicidal activity are selected.

20. A method of controlling undesired vegetation, which comprises allowing a herbicidally active amount of a substance identified by a method as claimed in claim 1 or of an antagonist of a protein encoded by a nucleic acid sequence as set forth in claim 1 identified by
i contacting cells which express the protein, or the protein, with a candidate substance;
ii assaying the biological activity of the protein;
iii comparing the biological activity of the protein with a standard activity in the absence of the candidate substance, a reduced biological activity of the protein indicating that the candidate substance is an antagonist, to act on plants or their environment.

21. (canceled)

22. A method for generating modified gene products encoded by the nucleic acid sequences SEQ ID NO: 1, SEQ ID NO: 3, SEQ ID NO: 5, SEQ ID NO: 7, SEQ ID NO: 9, SEQ ID NO: 11, SEQ ID NO: 13, SEQ ID NO: 15, SEQ ID NO: 17, SEQ ID NO: 26, SEQ ID NO: 28, SEQ ID NO: 30, SEQ ID NO: 32, SEQ ID NO: 34, SEQ ID NO: 36, SEQ ID NO: 38, SEQ ID NO: 40, SEQ ID NO: 44, SEQ ID NO: 46, SEQ ID NO: 48, SEQ ID NO: 50, SEQ ID NO: 52, SEQ ID NO: 54, SEQ ID NO: 56, SEQ ID NO: 58, SEQ ID NO: 60, SEQ ID NO: 62, SEQ ID NO: 64, SEQ ID NO: 66, SEQ ID NO: 68, SEQ ID NO: 70, SEQ ID NO: 72, SEQ ID NO: 74, SEQ ID NO: 76, SEQ ID NO: 78, SEQ ID NO: 80, SEQ ID NO: 82, SEQ ID NO: 84, SEQ ID NO: 86, SEQ ID NO: 88, SEQ ID NO: 90, SEQ ID NO: 92, SEQ ID NO: 94, SEQ ID NO: 96, SEQ ID NO: 98, SEQ ID NO: 100, SEQ ID NO: 102, SEQ ID NO: 106 or SEQ ID NO: 108
which comprises the following process steps:
a) expression of the proteins encoded by SEQ ID NO: 1, SEQ ID NO: 3, SEQ ID NO: 5, SEQ ID NO: 7, SEQ ID NO: 9, SEQ ID NO: 11, SEQ ID NO: 13, SEQ ID NO: 15, SEQ ID NO: 17, SEQ ID NO: 26, SEQ ID NO: 28, SEQ ID NO: 30, SEQ ID NO: 32, SEQ ID NO: 34, SEQ ID NO: 36, SEQ ID NO: 38, SEQ ID NO: 40, SEQ ID NO: 44, SEQ ID NO: 46, SEQ ID NO: 48, SEQ ID NO: 50, SEQ ID NO: 52, SEQ ID NO: 54, SEQ ID NO: 56, SEQ ID NO: 58, SEQ ID NO: 60, SEQ ID NO: 62, SEQ ID NO: 64, SEQ ID NO: 66, SEQ ID NO: 68, SEQ ID NO: 70, SEQ ID NO: 72, SEQ ID NO: 74, SEQ ID NO: 76, SEQ ID NO: 78, SEQ ID NO: 80, SEQ ID NO: 82, SEQ ID NO: 84, SEQ ID NO: 86, SEQ ID NO: 88, SEQ ID NO: 90, SEQ ID NO: 92, SEQ ID NO: 94, SEQ ID NO: 96, SEQ ID NO: 98, SEQ ID NO: 100, SEQ ID NO: 102, SEQ ID NO: 106 or SEQ ID NO: 108 in a heterologous system or in a cell-free system
b) randomized or directed mutagenesis of the protein by modification of the nucleic acid,
c) measuring the interaction of the modified gene product with the herbicide or the biological activity of the modified gene product in the presence of the herbicide,
d) identification of derivatives of the protein which exhibit a lesser degree of interaction or whose activity is less affected,
e) assaying the biological activity of the protein following application of the herbicide,
f) selection of the nucleic acid sequences which, or whose gene products, show a modified biological activity with regard to the herbicide.

23. A method as claimed in claim 22, wherein the sequences selected in accordance with claim 22 f) are introduced into an organism.

24. A method for generating transgenic plants which are resistant to substances found by a method as claimed in claim 1 or a method of identifiying an antagonist of proteins which are encoded by a nucleic acid sequence as set forth in claim 1 by following through the following process steps:
i contacting cells which express the protein, or the protein, with a candidate substance;
ii assaying the biological activity of the protein;
iii comparing the biological activity of the protein with a standard activity in the absence of the candidate substance, a reduced biological activity of the protein indicating that the candidate substance is an antagonist,
which comprises overexpressing, in these plants, nucleic acids with the sequences described in claim 1.

25. An organism generated by a method as claimed in claim 22.

26. A composition comprising a herbicidally active amount of at least one substance identified by a method as claimed in claim 1 or of an antagonist identified by a method of identifying an antagonist of proteins which are encoded by a nucleic acid sequence as set forth in claim 1 by following through the following process steps:
i contacting cells which express the protein, or the protein, with a candidate substance;
ii assaying the biological activity of the protein;
iii comparing the biological activity of the protein with a standard activity in the absence of the candidate substance, a reduced biological activity of the protein indicating that the candidate substance is an antagonist and at least one inert liquid and/or solid carrier and, optionally, at least one surfactant.

27. A composition comprising a growth-regulating amount of at least one substance identified by a method as claimed in claim 1 or of an antagonist identified by a method of identifying an antagonist of proteins which are encoded by a nucleic acid sequence as set forth in claim 1 by following through the following process steps:
i contacting cells which express the protein, or the protein, with a candidate substance;
ii assaying the biological activity of the protein;
iii comparing the biological activity of the protein with a standard activity in the absence of the candidate substance, a reduced biological activity of the protein indicating that the candidate substance is an antagonist and at least one inert liquid and/or solid carrier and, optionally, at least one surfactant.

28. A composition comprising the substance as claimed in claim 9.

29. A kit encompassing the nucleic acid construct as claimed in claim 8.

30. An organism generated by a method as claimed in claim 24.

31. A composition comprising the substance as claimed in claim 18.

32. A substance as claimed in claim 1, where in the substance is an antisense RNA comprising a nucleic acid molecule as shown in claim 1 or a fragment thereof.
